(19) United States
(12) Patent Application Publication
(10) Pub. No.: US 2006/0078901 A1
(43) Pub. Date: Apr. 13, 2006

(54) Listeria monocytogenes genome, polypeptides and uses

(76) Inventors: Carmen Buchrieser, Paris (FR); Lionel Frangeul, Saint Germain En Laye (FR); Elisabeth Couve, Rambouillet (FR); Christophe Rusniok, Le Plessis Robinson (FR); Hafida Fsihi, Paris (FR); Pierre Dehoux, Paris (FR); Olivier Dussurget, Paris (FR); Farid Chetouani, Cachan (FR); Hafed Nedjari, Puteaux (FR); Philippe Glaser, Paris (FR); Franck Kunst, Ivry Sur Seine (FR); Pascale Cossart, Paris (FR); Justin Daniels, Coulsdon (GB); Werner Goebei, Gerbrunn (DE); Jurgen Kreft, Gerbrunn (DE); Michael Kuhn, Westheim (DE); Eva Yee Wah Ng, Cambridge, MA (US); Jose Antonio Vazquez-Boland, Madrid (ES); Gustavo Dominguez-Bernal, Madrid (ES); Patricia Garrido-Garcia, Madrid (ES); Alberto Tierrez-Martinez, Madrid (ES); Alexandra Amend, Braunfels (DE); Trinad Chakraborty, Giessen (DE); Eugen Domann, Biebertal (DE); Thorsten Hain, Giessen (DE); Patrick Berche, Garches (FR); Alain Charbit, Paris (FR); Lionel Durant, Bievres (FR); Jose-Claudio Perez-Diaz, Madrid (ES); Fernando Baquero, Madrid (ES); Francisco Garcia Del Portillo, Madrid (ES); Nuria Gomez-Lopez, Madrid (ES); Encarna Maduenio, Madrid (ES); Betriz de Pablos, Madrid (ES); Jurgen Wehland, Braunschweig (DE); Uwe Karst, Wolfenbuttel (DE); Karl-Dieter Entian, Oberursel (DE); Jorg Hauf, Wolfskehlen (DE); Matthias Rose, Neu-Anspach (DE); Hamut Voss, Heidelberg (DE)

Correspondence Address: FINNEGAN, HENDERSON, FARABOW, GARRETT & DUNNER;LLP, 901 NEW YORK AVENUE, NW, WASHINGTON, DC, 20001-4413, US

(21) Appl. No.: 11/045,004

(22) Filed: Jan. 28, 2005

Related U.S. Application Data
(63) Continuation of application No. 10/637,657, filed on Aug. 11, 2003, now abandoned.
Application No. 10/637,657 is a continuation of application No. 10/257,023, now abandoned.

(30) Foreign Application Priority Data
Apr. 11, 2000 (FR) 00/04,629

(51) Int. Cl. C12Q 1/68; C07H 21/04; C12N 15/74; C12N 1/21; C07K 14/195

(52) U.S. Cl. 435/6; 435/69.3; 435/252.3; 435/471; 530/350; 536/23.7

(57) ABSTRACT

The genome sequence and nucleotide sequences of Listeria monocytogenes EGD-e are provided. Polypeptide sequences, including surface or cell envelope polypeptides, and polypeptides involved in metabolism, including B12 biosynthesis, are also provided. Uses of these sequences are also provided.

[0001] The invention relates to the genomic sequence and to nucleotide sequences encoding polypeptides of Listeria monocytogenes, such as cell envelope, secreted or specific polypeptides, or polypeptides involved in metabolism, in the replication process or in virulence, and also to vectors which include said sequences and to cells or animals transformed with these vectors. The invention also relates to methods for detecting these nucleic acids or polypeptides and to kits for diagnosing Listeria monocytogenes infection. The invention is also directed toward a method for selecting compounds capable of modulating bacterial infection and a method of biosynthesis or of biodegradation of molecules of interest using said nucleotide sequences or said polypeptides. Finally, the invention comprises pharmaceutical compositions, in particular vaccinal compositions, for preventing and/or treating bacterial infections, in particular Listeria monocytogenes infections.

[0002] Listeria monocytogenes is a facultative intracellular pathogen. It is the etiological agent of listeriosis, a food-related infection which poses increasingly great public health problems, with a considerable economic impact for the European food industry. Listeriosis is the most lethal food-related infection (approximately 30% mortality). Listeria monocytogenes has the unusual property of being able to cross three barriers: the intestinal barrier, the blood-brain barrier and the placental barrier. Clinical manifestations of listeriosis include meningitis, meningo-encephalitis, abortions and septicemias. This infection is opportunistic and mainly affects pregnant women, babies, elderly individuals and immunodepressed individuals, in particular individuals suffering from AIDS. This disease apparently also affects healthy individuals and is responsible for a considerable number of epidemics due to contaminated food products. Listeria monocytogenes is also important in veterinary terms, with the main risk being for members of the ovine family (sheep) and of the bovine family. Listeria monocytogenes is particularly resistant to stress or to extreme conditions, and it is important to search for its presence with care not only for problems with food safety, but also for problems of environmental safety.

[0003] The physical map and a preliminary genetic map of the Listeria monocytogenes genome have been established for the LO28 strain. However, no fine genetic map is available for the moment. The genome of this bacterium is circular and comprises approximately 3 000 kilobases. Its GC content is approximately 38%. Studies of virulence factors have enabled the identification of a 15 kb locus, which may be considered to be a pathogenicity island insofar as it contains most of the genes whose function in virulence has been clearly identified. In addition to this locus, some other genes have been identified, in particular the invasion and motility genes and genes which encode a murein hydrolase, a superoxide dismutase, sigma factors, etc.

[0004] An important family of Listeria monocytogenes proteins is the surface protein family. Evolutionary processes have allowed the development of a number of unique mechanisms on Gram+ bacteria, by which they can immobilize proteins at their surface. The functions of these various cell wall proteins are extremely diverse. However, many proteins covalently attached to the surface of Gram+ pathogens are felt to be important for survival of the pathogen inside the infected host. For Listeria monocytogenes, the ability to penetrate into eukaryotic cells has been linked to a family of surface and/or secreted proteins, the internalins. So far, nine members of the internalin family have been identified (InlA, InlB, InlC, InlC2, INlD, InlE, InlF, InlG and InlH). It is thought that they are anchored in the cell wall by proteolytic cleavage of the T-G bond of the LP×TG motif and that the covalent bonding of the carboxylic group of the threonine to a free amino group in the peptidoglycan [lacuna]. Recent studies have shown that there are two classes of internalins; a group of proteins associated with the cell wall, of high molecular weight (>50 kDa), and a group of smaller proteins (<30 kDa) which are secreted. These two classes have similar, very homologous LRR motifs, and also the LRR flanking regions, and the N-terminal signal peptide sequence. The small internalins (s-inl) do not have the B repeat region or the sequence for anchoring in the cell wall, and are thus secreted.

[0005] The study of Listeria monocytogenes requires new approaches, in particular genetic approaches, in order to improve understanding of the various metabolic pathways of this organism.

[0006] Thus, an object of the present invention is to disclose the complete sequence of the genome of Listeria monocytogenes EGD-e deposited with the CNCM [National Collection of Microorganism Cultures] on Apr. 11, 2000, under the number I-2440, and also of all the genes contained in said genome.

[0007] In fact, knowledge of the genome of this organism makes it possible to define more clearly the interactions between the various genes, the various proteins and, by the same token, the various metabolic pathways. In fact, and unlike the disclosure of isolated sequences, the complete genomic sequence of an organism makes up a whole entity, which immediately makes it possible to obtain all the information required by this organism in order to grow and function.

[0008] The present invention therefore relates to a nucleotide sequence of Listeria monocytogenes, characterized in that it corresponds to the sequence SEQ ID NO. 1.

[0009] The present invention also relates to a nucleotide sequence of Listeria monocytogenes, characterized in that it is chosen from:
[0010] a) a nucleotide sequence comprising at least 80%, 85%, 90%, 95% or 98% identity with SEQ ID NO. 1;
[0011] b) a nucleotide sequence which hybridizes, under high stringency conditions, with SEQ ID NO. 1;
[0012] c) a nucleotide sequence complementary to SEQ ID NO. 1 or complementary to a nucleotide sequence as defined in a) or b), or a nucleotide sequence of the corresponding RNA;
[0013] d) a nucleotide sequence of a representative fragment of SEQ ID NO. 1, or of a representative fragment of a nucleotide sequence as defined in a), b) or c);
[0014] e) a nucleotide sequence comprising a sequence as defined in a), b), c) or d); and
[0015] f) a modified nucleotide sequence of a nucleotide sequence as defined in a), b), c), d) or e).

[0016] More particularly, a subject of the present invention is also the nucleotide sequences characterized in that they are derived from SEQ ID NO. 1 and in that they encode a polypeptide chosen from the polypeptides of sequence SEQ ID NO. 2 to SEQ ID NO. 2854, preferably encoding a cell envelope polypeptide or a polypeptide present at the surface of Listeria monocytogenes of sequence SEQ ID NO. 2 to SEQ ID NO. 41, or encoding a polypeptide involved in vitamin B12 bio synthesis of sequence SEQ ID NO. 42 to SEQ ID NO. 64.

[0017] More generally, the present invention also relates to the nucleotide sequences derived from SEQ ID NO.1, and encoding a polypeptide of L. monocytogenes, as may be isolated from SEQ ID NO. 1.

[0018] In addition, the nucleotide sequences characterized in that they comprise a nucleotide sequence chosen from:
[0019] a) a nucleotide sequence encoding a polypeptide chosen from the sequences SEQ ID NO. 2 to SEQ ID NO. 2854, preferably chosen from the polypeptides of sequence SEQ ID NO. 2 to SEQ ID NO. 41 or SEQ ID NO. 42 to SEQ ID NO. 64;
[0020] b) a nucleotide sequence comprising at least 80%, 85%, 90%, 95% or 98% identity with a nucleotide sequence encoding a polypeptide chosen from the sequences SEQ ID NO. 2 to SEQ ID NO. 2854, preferably chosen from the polypeptides of sequence SEQ ID NO. 2 to SEQ ID NO. 41 or SEQ ID NO. 42 to SEQID NO. 64;
[0021] c) a nucleotide sequence which hybridizes, under high stringency conditions, with a nucleotide sequence encoding a polypeptide chosen from the sequences SEQ ID NO. 2 to SEQ ID NO. 2854, preferably chosen from the polypeptides of sequence SEQ ID NO. 2 to SEQ ID NO. 41 or SEQ ID NO. 42 to SEQ ID NO. 64;
[0022] d) a complementary nucleotide sequence or an RNA sequence corresponding to a sequence as defined in a), b) or c);
[0023] e) a nucleotide sequence of a representative fragment of a sequence as defined in a), b), c) or d); and
[0024] f) a modified nucleotide sequence of a sequence as defined in a), b), c), d) or e), are also subjects of the invention.

[0025] The terms “nucleic acid”, “nucleic acid sequence”, “polynucleotide”, “oligonucleotide”, “polynucleotide sequence” and “nucleotide sequence”, which will be used indifferently in the present description, are intended to denote a precise series of nucleotides, which may or may not be modified, making it possible to define a fragment or a region of a nucleic acid, which may or may not comprise unnatural nucleotides, and which may correspond equally to a double-stranded DNA, a single-stranded DNA and products of transcription of said DNAs. Thus, the nucleic acid sequences according to the invention also encompass PNAs (peptide nucleic acids), or the like.

[0026] It should be understood that the present invention does not relate to the nucleotide sequences in their natural chromosomal environment, i.e. in the natural state. They are sequences which have been isolated and/or purified, i.e. they have been taken directly or indirectly, for example by copying, their environment having been at least partially modified. Nucleic acids obtained by chemical synthesis are also intended to be denoted.

[0027] For the purpose of the present invention, the term “percentage identity” between two nucleic acid or amino acid sequences is intended to denote a percentage of nucleotides or of amino acid residues which are identical between the two sequences to be compared, obtained after the best alignment, this percentage being purely statistical and the differences between the two sequences being distributed randomly and over their entire length. The term “best alignment” or “optimal alignment” is intended to denote the alignment for which the percentage identity determined as below is the highest. Sequence comparisons between two nucleic acid or amino acid sequences are conventionally carried out by comparing these sequences after having aligned them optimally, said comparison being made by segment or by “window of comparison” so as to identify and compare local regions of sequence similarity. The optimal alignment of the sequences for the comparison may be produced, besides manually, by means of the local homology algorithm of Smith and Waterman (1981, Ad. App. Math. 2: 482), by means of the local homology algorithm of Neddleman and Wunsch (1970, J. Mol. Biol. 48 : 443), by means of the similarity search method of Pearson and Lipman (1988, Proc. Natl. Acad. Sci. USA 85 : 2444), by means of computer programs using these algorithms (GAP, BESTFIT, BLAST P, BLAST N, FASTA and TFASTA in the Wisconsin Genetics Software Package, Genetics Computer Group, 575 Science Dr., Madison, Wis.). In order to obtain the optimal alignment, the BLAST program is preferably used, with the BLOSUM 62 matrix. The PAM or PAM250 matrices may also be used.

[0028] The percentage identity between two nucleic acid or amino acid sequences is determined by comparing these two sequences aligned in an optimal manner in which the nucleic acid or amino acid sequence to be compared may comprise additions or deletions compared to the reference sequence for an optimal alignment between these two sequences. The percentage identity is calculated by determining the number of identical positions for which the nucleotide or the amino acid residue is identical between the two sequences, dividing this number of identical positions by the total number of positions compared and multiplying the result obtained by 100 so as to obtain the percentage identity between these two sequences.

[0029] The expression “nucleic acid sequences having a percentage identity of at least 80%, preferably 85% to 90%, more preferably 95% or even 98%, after optimal alignment with a reference sequence” is intended to denote the nucleic acid sequences having, compared to the reference nucleic acid sequence, certain modifications, such as in particular a deletion, a truncation, an extension, a chimeric fusion and/or a substitution, in particular of the point type, and in which the nucleic acid sequence exhibits at least 80%, preferably 85%, 90%, 95% or 98%, identity after optimal alignment with the reference nucleic acid sequence. They are preferably sequences whose complementary sequences are capable of hybridizing specifically with the reference sequences. Preferably, the specific or high stringency hybridization conditions will be such that they ensure at least 80%, preferably 85%, 90%, 95% or 98%, identity after optimal alignment between one of the two sequences and the sequence complementary to the other.

[0030] Hybridization after high stringency conditions means that the conditions of temperature and of ionic strength are chosen such that they allow hybridization between two complementary DNA fragments to be maintained. By way of illustration, high stringency conditions in the hybridization step for the purposes of defining the polynucleotide fragments described above are advantageously as follows.

[0031] The DNA-DNA or DNA-RNA hybridization is carried out in two steps: (1) prehybridization at 42° C. for 3 hours in phosphate buffer (20 mM, pH 7.5) containing 5×SSC (1×SSC corresponds to a solution of 0.15 M NaCl+0.015 M sodium citrate), 50% of formamide, 7% of sodium dodecyl sulfate (SDS), 10×Denhardt's, 5% of dextran sulfate and 1% of salmon sperm DNA; (2) hybridization per se for 20 hours at a temperature which depends on the length of the probe (i.e. 42° C. for a probe >100 nucleotides in length), followed by 2 washes of 20 minutes at 20° C. in 2×SSC +2% SDS, and I wash of 20 minutes at 20° C. in 0.1×SSC+0.1% SDS. The final wash is carried out in 0.1 ×SSC+0.1% SDS for 30 minutes at 60° C. for a probe >100 nucleotides in length. The high stringency hybridization conditions described above for a polynucleotide of defined length may be adjusted by those skilled in the art for oligonucleotides which are longer or shorter, according to the teaching of Sambrook et al., (1989, Molecular cloning: a laboratory manual. 2nd Ed. Cold Spring Harbor).

[0032] In addition, the expression “representative fragment of sequences according to the invention” is intended to denote any nucleotide fragment having at least 15 consecutive nucleotides, preferably at least 20, 25, 30, 50, 75, 100, 150, 300 and 450 consecutive nucleotides, of the sequence from which it is derived.

[0033] The term “representative fragment” is in particular intended to mean a nucleic acid sequence encoding a biologically active fragment of a polypeptide, as defined below.

[0034] The term “representative fragment” is also intended to mean the intergenic sequences, and in particular the nucleotide sequences carrying the regulatory signals (promoters, terminators, or even enhancers, etc).

[0035] Among said representative fragments, preference is given to those having nucleotide sequences corresponding to open reading frames, named ORF sequences (ORF for open reading frame), generally included between an initiation codon and a stop codon, or between two stop codons, and encoding polypeptides, preferably of at least 100 amino acids, such as, for example, without being limited thereto, the ORF sequences which will subsequently be described.

[0036] The numbering of the ORF nucleotide sequences which will subsequently be used in the present description corresponds to the numbering of the amino acid sequences of the proteins encoded by said ORFs.

[0037] The representative fragments according to the invention may be obtained, for example, by specific amplification, such as PCR, or after digestion, with suitable restriction enzymes, of nucleotide sequences according to the invention, this method being described in particular in the work by Sambrook et al. Said representative fragments may also be obtained by chemical synthesis when they are not too long, according to methods well known to those skilled in the art.

[0038] The sequences containing sequences according to the invention, or representative fragments, are also intended to include the sequences which are naturally framed by sequences which exhibit at least 80%, 85%, 90%, 95% or 98% identity with the sequences according to the invention.

[0039] The term “modified nucleotide sequence” is intended to mean any nucleotide sequence obtained by mutagenesis according to techniques well known to those skilled in the art, and comprising modifications, preferably a maximum of 10% of modified nucleotides, compared to the normal sequences, for example mutations in the regulatory and/or promoter sequences for expression of the polypeptide, in particular leading to a modification of the level of expression or of the activity of said polypeptide.

[0040] The term “modified nucleotide sequence” is also intended to mean any nucleotide sequence encoding a modified polypeptide as defined below.

[0041] The representative fragments according to the invention may also be probes or primers, which may be used in methods for detecting, identifying, assaying or amplifying nucleic acid sequences.

[0042] For the purpose of the invention, a probe or primer is defined as being a single-stranded nucleic acid fragment or a denatured double-stranded fragment, comprising, for example, from 12 bases to a few kb, in particular from 15 bases to a few hundreds of bases, preferably from 15 to 50 or 100 bases, and possessing a specificity of hybridization under given conditions so as to form a hybridization complex with a target nucleic acid.

[0043] The probes and primers according to the invention may be labeled directly or indirectly with a radioactive or nonradioactive compound using methods well known to those skilled in the art, in order to obtain a detectable and/or quantifiable signal.

[0044] The unlabeled polynucleotide sequences according to the invention may be used directly as a probe or primer.

[0045] The sequences are generally labeled so as to obtain sequences which can be used for many applications. The primers or the probes according to the invention are labeled with radioactive elements or with nonradioactive molecules.

[0046] Among the radioactive isotopes used, mention may be made of ³²P, ³³P, ³⁵S, ³H or ¹²⁵I. The nonradioactive entities are selected from ligands, such as biotin, avidin, streptavidin or dioxigenin, haptens, dyes and luminescent agents, such as radioluminescent, chemiluminescent, bioluminescent, fluorescent or phosphorescent agents.

[0047] The polynucleotides according to the invention may thus be used as a primer and/or probe in methods using in particular the PCR (polymerase chain reaction) technique) (Rolfs et al., 1991, Berlin: Springer-Verlag). This technique requires choosing pairs of oligonucleotide primers framing the fragment which must be amplified. Reference may, for example, be made to the technique described in U.S. Pat. No. 4,683,202. The amplified fragments can be identified, for example after agarose or polyacrylamide gel electrophoresis, or after a chromatographic technique such as gel filtration or ion exchange chromatography, and then sequenced. The specificity of the amplification can be controlled using, as a primer, the nucleotide sequences of polynucleotides of the invention and, as a matrix, plasmids containing these sequences or else the derived amplification products. The amplified nucleotide fragments may be used as reagents in hybridization reactions in order to demonstrate the presence, in a biological sample, of a target nucleic acid with the sequence complementary to that of said amplified nucleotide fragments.

[0048] The invention is also directed toward the nucleic acids which can be obtained by amplification using primers according to the invention.

[0049] Other techniques for amplifying the target nucleic acid may advantageously be used as an alternative to PCR (PCR-like), using a pair of primers of nucleotide sequences according to the invention. The term “PCR-like” is intended to denote all the methods carrying out direct or indirect reproductions of nucleic acid sequences, or in which the labeling systems have been amplified; these techniques are of course well known; in general, they involve amplification of the DNA by a polymerase; when the sample of origin is an RNA a prior reverse transcription should be carried out. There are currently a large number of methods for this amplification, such as, for example, the SDA (strand displacement amplification) technique (Walker et al., 1992, Nucleic Acids Res. 20: 1691), the TAS (transcription-based amplification system) technique described by Kwoh et al. (1989, Proc. Natl. Acad. Sci. USA, 86, 1173), the 3SR (self-sustained sequence replication) technique described by Guatelli et al. (1990, Proc. Natl. Acad. Sci. USA 87: 1874), the NASBA (nucleic acid sequence based amplification) technique described by Kievitis et al. (1991, J. Virol. Methods, 35, 273), the TMA (transcription mediated amplification) technique, the LCR (ligase chain reaction) technique described by Landegren et al. (1988, Science 241, 1077), the RCR (repair chain reaction) technique described by Segev (1992, Kessler C. Springer Verlag, Berlin, New-York, 197-205), the CPR (cycling probe reaction) technique described by Duck et al. (1990, Biotechniques, 9, 142) or the Q-beta-replicase amplification technique described by Miele et al. (1983, J. Mol. Biol., 171, 281). Some of these techniques have since been improved.

[0050] When the target polynucleotide to be detected is an mRNA, an enzyme of the reverse transcriptase type is advantageously used, prior to carrying out an amplification reaction using the primers according to the invention or to carrying out a detection method using the probes of the invention, in order to obtain a cDNA from the mRNA contained in the biological sample. The cDNA obtained will then serve as a target for the primers or the probes used in the amplification or detection method according to the invention.

[0051] The probe hybridization technique may be performed in many ways (Matthews et al., 1988, Anal. Biochem., 169, 1-25). The most general method consists in immobilizing the nucleic acid extracted from the cells of various tissues, or from cells in culture, on a support (such as nitrocellulose, nylon or polystyrene) and in incubating, under well-defined conditions, the immobilized target nucleic acid with the probe. After hybridization, the excess probe is removed and the hybrid molecules formed are detected using a suitable method (measurement of the radioactivity, of the fluorescence or of the enzymatic activity linked to the probe).

[0052] According to another embodiment of the nucleic acid probes according to the invention, the latter may be used as capture probes. In this case, a probe, termed “capture probe”, is immobilized on a support and is used to capture, by specific hybridization, the target nucleic acid obtained from the biological sample to be tested, and the target nucleic acid is then detected using a second probe, termed “detection probe”, labeled with a readily detectable element.

[0053] Among the advantageous nucleic acid fragments, mention should thus in particular be made of antisense oligonucleotides, i.e. oligonucleotides with a structure which ensures, by hybridization with the target sequence, inhibition of expression of the corresponding product. Mention should also be made of the sense oligonucleotides which, by interacting with proteins involved in the regulation of expression of the corresponding product, will induce either inhibition or activation of this expression.

[0054] Preferably, the probes or primers according to the invention are covalently or noncovalently immobilized on a support. In particular, the support may be a DNA chip or a high density filter, which are also subjects of the present invention.

[0055] The term “DNA chip” or “high density filter” is intended to denote a support to which DNA sequences are attached, it being possible to pinpoint each one of these sequences via its geographical location. These chips or filters differ mainly in their size, the material of the support and, possibly, the number of DNA sequences which are attached thereto.

[0056] The probes or primers according to the first invention can be attached to solid supports, in particular DNA chips, using various production methods. In particular, in situ synthesis may be performed by photochemical addressing or by inkjet. Other techniques consist in performing ex situ synthesis and attaching the probes to the DNA chip support by mechanical or electronic addressing or by inkjet. These various methods are well known to those skilled in the art.

[0057] A nucleotide sequence (probe or primer) according to the invention therefore makes it possible to detect or amplify specific nucleic acid sequences. In particular, the detection of these said sequences is facilitated when the probe is attached to a DNA chip, or to a high density filter.

[0058] The use of DNA chips or of high density filters in fact makes it possible to determine gene expression in an organism having a genomic sequences close to L. monocytogenes EGD-e.

[0059] The genomic sequence of L. monocytogenes EGD-e, supplemented by the identification of all the genes in this organism, as presented in the present invention, serves as a basis for constructing these DNA chips or filters.

[0060] The preparation of these filters or chips consists in synthesizing oligonucleotides corresponding to the 5′ and 3′ ends of the genes. These oligonucleotides are chosen using the genomic sequence and its annotations disclosed by the present invention. The temperature for pairing of these oligonucleotides at the corresponding sites on the DNA should be approximately the same for each oligonucleotide. This makes it possible to prepare DNA fragments corresponding to each gene using suitable PCR conditions in a highly automated environment. The amplified fragments are then immobilized on filters or supports made of glass, silicon or synthetic polymers and these media are used for the hybridization.

[0061] The availability of such filters and/or chips and of the corresponding annotated genomic sequence makes it possible to study the expression of large groups, or even all, of the genes in the microorganisms associated with Listeria monocytogenes, by preparing these complementary DNAs and hybridizing them to the DNA or to the oligonucleotides immobilized on the filters or the chips. In addition, the filters and/or the chips make it possible to study the variability of strains or of species, by preparing the DNA of these organisms and hybridizing it to the DNA or to the oligonucleotides immobilized on the filters or the chips.

[0062] The differences between the genomic sequences of the various strains or species can greatly affect the strength of hybridization and, consequently, affect the interpretation of the results. It may therefore be necessary to have the precise sequence of the genes of the strains intended to be studied. The method for detecting genes described below in detail, involving determining the sequence of random fragments of a genome and organizing them according to the sequence of the complete genome of Listeria monocytogenes EGD-e disclosed in the present invention, may be very useful.

[0063] The nucleotide sequences according to the invention may be used in DNA chips to carry out mutation analysis. This analysis is based on constituting chips capable of analyzing each base of a nucleotide sequence according to the invention. For this purpose, techniques for microsequencing on a DNA chip may in particular be used. The mutations are detected by extension of immobilized primers which hybridize with the matrix of the sequences analyzed, in a position just adjacent to that of the mutated nucleotide sought. A single-stranded RNA or DNA matrix of the sequences to be analyzed will advantageously be prepared according to conventional methods, using products amplified according to techniques such as PCR. The single-stranded DNA or RNA matrices thus obtained are then deposited onto the DNA chip, under conditions which allow them to hybridize specifically to the immobilized primers. A heat-stable polymerase, for example Tth or Taq DNA polymerase, specifically extends the 3′ end of the immobilized primer with a labeled nucleotide analog complementary to the nucleotide in the position of the variable site; for example, a thermal cycle is performed in the presence of fluorescent dideoxyribonucleotides. The experimental conditions will be adjusted in particular to the chips used, to the primers immobilized, to the polymerases used and to the labeling system chosen. An advantage of microsequencing, compared to techniques based on probe hybridization, is that it makes it possible to identify all the variable nucleotides with optimum discrimination under homogeneous reaction conditions; used on DNA chips, it allows optimum resolution and specificity for the routine and industrial multiplex detection of mutations.

[0064] The use of the high density filters and/or of the chips thus makes it possible to obtain new knowledge regarding gene regulation in organisms of industrial importance, and in particular listeria propagated under various conditions. It also allows rapid identification of the differences between the genomes of the strains used in many industrial applications.

[0065] In addition, a DNA chip or a filter may be an extremely advantageous tool for determining, detecting and/or identifying a microorganism. Thus, preference is also given to the DNA chips according to the invention which also contain at least one nucleotide sequence of a microorganism other than Listeria monocytogenes, immobilized on the support of said chip. Preferably, the microorganism chosen is selected from the bacteria of the Listeria genus (hereinafter designated as L. monocytogenes-associated bacteria), or the variants of Listeria monocytogenes EGD-e.

[0066] A DNA chip or a filter according to the invention is a very useful element of certain kits or packs for detecting and/or identifying microorganisms, in particular bacteria belonging to the species Listeria monocytogenes or associated microorganisms, which are also subjects of the invention.

[0067] Moreover, the DNA chips or the filters according to the invention, containing probes or primers specific for Listeria monocytogenes, are very advantageous elements of kits or packs for detecting and/or quantifying the expression of genes of Listeria monocytogenes (or of associated microorganisms).

[0068] In fact, the control of gene expression is a critical point for optimizing the growth and yield of a strain, either by allowing the expression of one or more new genes, or by modifying the expression of genes already present in the cell. The present invention provides all the sequences naturally active in L. monocytogenes allowing gene expression. It thus makes it possible to determine all the sequences expressed in L. monocytogenes. It also provides a tool for locating the genes the expression of which follows a given scheme. To do this, the DNA of some or all of the genes of L. monocytogenes may be amplified using primers according to the invention, and then attached to a support, such as, for example, glass or nylon or a DNA chip, in order to construct a tool which makes it possible to follow the expression profile of these genes. This tool, consisting of this support containing the coding sequences, is used as a matrix for hybridization to a mixture of labeled molecules which reflect the messenger RNAs expressed in the cell (in particular the labeled probes according to the invention). By repeating this experiment at various times and combining all of these data by a suitable processing, the expression profiles of all of these genes are then obtained. It is also possible to take advantage of knowledge of the sequences which follow a given regulatory scheme in order to search, in a directed manner, for example by homology, for other sequences which follow the same regulatory scheme overall, but in a slightly different manner. In addition, it is possible to isolate each control sequence present upstream of the segments being used as probes and to follow the activity thereof using suitable means, such as a reporter gene (luciferase, β-galactosidase, GFP (for green fluorescent protein)). These isolated sequences can then be modified and assembled by metabolic engineering with sequences of interest with a view to optimal expression thereof.

[0069] Using the genomic sequence presented in the present invention, those skilled in the art will be able to identify the genes encoding proteins which regulate gene transcription in L. monocytogenes. Moreover, table I provides the list of open reading frames (ORF) identified on the Listeria monocytogenes genome (SEQ ID NO. 1), with their position on said genome, and the putative functions which may be attributed to them. However, such a list should not be considered to be limiting, a protein possibly being made to have several roles in the cell.

[0070] Modifying the structure or the integrity of these genes may make it possible to modify the expression of the target genes controlled by promoters which are targets for these regulators. Thus, those skilled in the art may choose the regulator(s) relevant for the desired application and also their target, which makes it possible to optimize the expression of genes of interest. The use of the tools described above, such as the DNA chips, also makes it possible to pinpoint all the genes the regulation of which is modified by inactivation of certain genes. It is thus possible to select a set of control sequences corresponding, to within a few slight differences, to the same type of regulation. These sequences may then be used to control the expression of genes of interest.

[0071] The invention also relates to the polypeptides encoded by a nucleotide sequence according to the invention, preferably by a representative fragment of the sequence SEQ ID NO. 1, and corresponding to an ORF sequence, as described in table I. In particular, the polypeptides of Listeria monocytogenes characterized in that they are chosen from the polypeptides of sequence SEQ ID NO. 2 to SEQ ID NO. 2854, preferably of sequence SEQ ID NO. 2 to SEQ ID NO. 41 and SEQ ID NO. 42 to SEQ ID NO. 64, are a subject of the invention.

[0072] The invention also comprises the polypeptides characterized in that they comprise a polypeptide chosen from:
[0073] a) a polypeptide according to the invention;
[0074] b) a polypeptide exhibiting at least 80%, preferably 85%, 90%, 95% and 98%, identity with a polypeptide according to the invention;
[0075] c) a fragment of at least 5 amino acids of a polypeptide according to the invention, or as defined in b);
[0076] d) a biologically active fragment of a polypeptide according to the invention, or as defined in b) or c); and
[0077] e) a modified polypeptide of a polypeptide according to the invention, or as defined in b), c) or d).

[0078] The nucleotide sequences encoding the polypeptides described above are also a subject of the invention.

[0079] In the present description, the terms “polypeptides”, “polypeptide sequences”, “peptides” and “proteins” are interchangeable.

[0080] It should be understood that the invention does not relate to the polypeptides in natural form, i.e. they are not taken in their natural environment, but it has been possible to isolate or obtain them by purification from natural sources, or else obtain them by genetic recombination or by chemical synthesis, and they may then comprise unnatural amino acids, as will be described below.

[0081] The expression “polypeptide having a certain percentage identity with another”, which will also be denoted by the term “homologous polypeptide”, is intended to denote polypeptides which, compared to natural polypeptides, have certain modifications, in particular a deletion, addition or substitution of at least one amino acid, a truncation, an extension, a chimeric solution and/or a mutation, or the polypeptides which have post-translational modifications. Among the homologous polypeptides, preference is given to those the amino acid sequence of which exhibits at least 80%, preferably 85%, 90%, 95% and 98%, homology with the amino acid sequences of the polypeptides according to the invention. In the case of a substitution, one or more consecutive or nonconsecutive amino acid(s) is (are) replaced with “equivalent” amino acids. The expression “equivalent amino acids” is herein intended to denote any amino acid which can be substituted for one of the amino acids of the basic structure without, however, essentially modifying the biological activities of the corresponding peptides, and as will be defined subsequently.

[0082] These equivalent amino acids may be determined either based on their structural homology with the amino acids for which they substitute, or based on the results of comparative assays of biological activity between the various polypeptides liable to be produced.

[0083] By way of example, mention is made of the possibilities of substitution which can be performed without resulting in a profound modification of the biological activity of the corresponding modified polypeptide. It is thus possible to replace leucine with valine or isoleucine, aspartic acid with glutamic acid, glutamine with asparagine, arginine with lysine, etc, it naturally being possible to envisage the reverse substitution under the same conditions.

[0084] The homologous polypeptides also correspond to the polypeptides encoded by the homologous or identical nucleotide sequences as previously defined, and thus comprise, in the present definition, mutated polypeptides or polypeptides corresponding to inter- or intraspecies variations, possibly existing in Listeria, and which in particular correspond to truncations, substitutions, deletions and/or additions of at least one amino acid residue.

[0085] It is understood that the percentage identity between two polypeptides is calculated in the same way as between two nucleic acid sequences. Thus, the percentage identity between two polypeptides is calculated after optimal alignment of these two sequences, on a window of maximum homology. To define said window of maximum homology, it is possible to use the same algorithms as for the nucleic acid sequences.

[0086] The expression “biologically active fragment of a polypeptide according to the invention” is intended in particular to denote a polypeptide fragment, as defined below, having at least one of the biological characteristics of the polypeptides according to the invention, in particular in that it is capable of generally exercising an activity, even a partial activity, such as, for example:
[0087] an enzymatic (metabolic) activity or an activity which may be involved in the biosynthesis or the biodegradation of organic or inorganic compounds;
[0088] a structural activity (cell envelope, chaperone molecule, ribosome);
[0089] a transport activity (transporting energy, transporting an ion); or an activity in protein secretion;
[0090] an activity in the process of replication, amplification, preparation, transcription, translation or maturation, in particular of DNA, of RNA or of proteins.

[0091] The expression “polypeptide fragment according to the invention” is intended to denote a polypeptide comprising a minimum of 5 amino acids, preferably 10, 15, 25, 50, 100 and 150 amino acids.

[0092] The polypeptide fragments may correspond to isolated or purified fragments naturally present in strains of Listeria, or to fragments which may be obtained by cleaving said polypeptide with a proteolytic enzyme such as trypsin or chymotrypsin or collagenase, or with a chemical reagent (cyanogen bromide, CNBr), or by placing said polypeptide in a very acidic environment (for example at pH=2.5). Polypeptide fragments may also be prepared by chemical synthesis, and using hosts transformed with an expression vector according to the invention, which contain a nucleic acid allowing expression of said fragment and placed under the control of the appropriate regulatory and/or expression elements.

[0093] The “modified polypeptide” of a polypeptide according to the invention is intended to denote a polypeptide obtained by genetic recombination or by chemical synthesis, as described below, which has at least one modification compared to the normal sequence, preferably at most 10% of modified amino acids compared to the normal sequence. These modifications may in particular be carried on amino acids required for the specificity or the effectiveness of the activity, or responsible for the structural conformation, for the charge or for the hydrophobicity of the polypeptide according to the invention. It is thus possible to create polypeptides with equivalent, increased or decreased activity, or with equivalent, narrower or broader specificity. Among the modified polypeptides, mention should be made of the polypeptides in which up to five amino acids may be modified, truncated at the N— or C-terminal end, or else deleted, or added.

[0094] As is indicated, the aim of the modifications of a polypeptide are in particular:
[0095] to allow the use thereof in methods of biosynthesis or biodegradation of organic or inorganic compounds,
[0096] to allow the use thereof in methods of replication, amplification, repair and regulation of transcription, translation or maturation, in particular of DNA, RNA or proteins,
[0097] to allow the improved secretion thereof,
[0098] to modify the solubility thereof, or the effectiveness or specificity of the activity thereof, or alternatively to facilitate the purification thereof.

[0099] Chemical synthesis also has the advantage of being able to use unnatural amino acids or nonpeptide bonds. Thus, it may be advantageous to use unnatural amino acids, for example in D form, or analogs of amino acids, in particular sulfur-containing forms.

[0100] The present invention provides the nucleotide sequence of the genome of Listeria monocytogenes EGD-e, and also certain polypeptide sequences. Those skilled in the art may determine the other ORFs using known methods and suitable software.

[0101] Among the genes identified in the genomic sequence of L. monocytogenes, mention may in particular be made of the genes involved in vitamin B12 biosynthesis (SEQ ID NO. 42 to SEQ ID NO. 64). This bacterium is thus capable of naturally synthesizing this vitamin, and knowledge of the genes leading to their synthesis allows those skilled in the art to optimize expression of these genes or to modify them for the purpose of increasing production of this vitamin. Thus, a subject of the present invention is also a method for producing vitamin B12, characterized in that a host cell containing the genes corresponding to SEQ ID NO. 42 to SEQ ID NO. 64 is provided with the starting substrate, in that it is cultured under conditions suitable for the production of vitamin B12, and in that said vitamin is recovered. The host cell is preferably a bacterial cell, more preferably a bacterium of the Bacillus or Listeria genus. A method for producing vitamin B12 using a nucleic acid or polypeptide sequence according to the invention, a host cell according to the invention, or an animal or plant according to the invention is also a subject of the present invention.

[0102] In general, the list of SEQ ID sequences, or their corresponding coding nucleic acid sequence, may be determined by those skilled in the art using the most probable putative functions determined for each of the SEQ ID sequences in table I hereinafter for each of the classes of activity listed hereinafter.

[0103] Thus and preferably, the invention relates to a nucleotide sequence according to the invention, characterized in that it encodes a polypeptide of Listeria monocytogenes, or a fragment thereof, involved in vitamin B12 biosynthesis. It is preferably a polypeptide sequence of SEQ ID NO. 42 to SEQ ID NO. 64.

[0104] Preferably, the invention relates to a nucleotide sequence according to the invention, characterized in that it encodes a cell envelope polypeptide or polypeptide at the surface of Listeria monocytogenes, or a fragment thereof. It is preferably a polypeptide of sequence SEQ ID NO. 2 to SEQ ID NO. 41.

[0105] Preferably, the invention relates to a nucleotide sequence according to the invention, characterized in that it encodes a polypeptide of Listeria monocytogenes, or a fragment thereof, involved in amino acid biosynthesis.

[0106] Preferably, the invention relates to a nucleotide sequence according to the invention, characterized in that it encodes a polypeptide of Listeria monocytogenes, or a fragment thereof, involved in the biosynthesis of cofactors, prosthetic groups and transporters.

[0107] Preferably, the invention relates to a nucleotide sequence according to the invention, characterized in that it encodes a polypeptide of Listeria monocytogenes, or a fragment thereof, involved in the cellular machinery.

[0108] Preferably, the invention relates to a nucleotide sequence according to the invention, characterized in that it encodes a polypeptide of Listeria monocytogenes, or a fragment thereof, involved in central intermediate metabolism.

[0109] Preferably, the invention relates to a nucleotide sequence according to the invention, characterized in that it encodes a polypeptide of Listeria monocytogenes, or a fragment thereof, involved in energetic metabolism.

[0110] Preferably, the invention relates to a nucleotide sequence according to the invention, characterized in that it encodes a polypeptide of Listeria monocytogenes, or a fragment thereof, involved in the metabolism of fatty acids and phospholipids.

[0111] Preferably, the invention relates to a nucleotide sequence according to the invention, characterized in that it encodes a polypeptide of Listeria monocytogenes, or a fragment thereof, involved in the metabolism of nucleotides, purines, pyrimidines or nucleosides.

[0112] Preferably, the invention relates to a nucleotide sequence according to the invention, characterized in that it encodes a polypeptide of Listeria monocytogenes, or a fragment thereof, involved in regulatory functions.

[0113] Preferably, the invention relates to a nucleotide sequence according to the invention, characterized in that it encodes a polypeptide of Listeria monocytogenes, or a fragment thereof, involved in the replication process.

[0114] Preferably, the invention relates to a nucleotide sequence according to the invention, characterized in that it encodes a polypeptide of Listeria monocytogenes, or a fragment thereof, involved in the transcription process.

[0115] Preferably, the invention relates to a nucleotide sequence according to the invention, characterized in that it encodes a polypeptide of Listeria monocytogenes, or a fragment thereof, involved in the translation process.

[0116] Preferably, the invention relates to a nucleotide sequence according to the invention, characterized in that it encodes a polypeptide of Listeria monocytogenes, or a fragment thereof, involved in the process of transport and binding of proteins.

[0117] Preferably, the invention relates to a nucleotide sequence according to the invention, characterized in that it encodes a polypeptide of Listeria monocytogenes, or a fragment thereof, involved in adaptation to atypical conditions.

[0118] Preferably, the invention relates to a nucleotide sequence according to the invention, characterized in that it encodes a polypeptide of Listeria monocytogenes, or a fragment thereof, involved in sensitivity to medicinal products and analogs.

[0119] Preferably, the invention relates to a nucleotide sequence according to the invention, characterized in that it encodes a polypeptide of Listeria monocytogenes, or a fragment thereof, involved in functions relating to transposons.

[0120] Preferably, the invention relates to a nucleotide sequence according to the invention, characterized in that it encodes a polypeptide specific for Listeria monocytogenes, or a fragment thereof.

[0121] In another aspect, a subject of the invention is preferably a polypeptide according to the invention, characterized in that it is a polypeptide of Listeria monocytogenes, or a fragment thereof, involved in vitamin B12 biosynthesis. It is preferably a polypeptide of sequence SEQ ID NO. 42 to SEQ ID NO. 64.

[0122] In another aspect, a subject of the invention is preferably a polypeptide according to the invention, characterized in that it is a cell envelope polypeptide or a surface polypeptide of Listeria monocytogenes, or a fragment thereof. It is preferably a polypeptide of sequence SEQ ID NO. 2 to SEQ ID NO. 41.

[0123] In another aspect, a subject of the invention is preferably a polypeptide according to the invention, characterized in that it is a polypeptide of Listeria monocytogenes, or a fragment thereof, involved in amino acid biosynthesis.

[0124] In another aspect, a subject of the invention is preferably a polypeptide according to the invention, characterized in that it is a polypeptide of Listeria monocytogenes, or a fragment thereof, involved in the biosynthesis of cofactors, prosthetic groups and transporters.

[0125] In another aspect, a subject of the invention is preferably a polypeptide according to the invention, characterized in that it is a polypeptide of Listeria monocytogenes, or a fragment thereof, involved in the cellular machinery.

[0126] In another aspect, a subject of the invention is preferably a polypeptide according to the invention, characterized in that it is a polypeptide of Listeria monocytogenes, or a fragment thereof, involved in central intermediate metabolism.

[0127] In another aspect, a subject of the invention is preferably a polypeptide according to the invention, characterized in that it is a polypeptide of Listeria monocytogenes, or a fragment thereof, involved in energetic metabolism.

[0128] In another aspect, a subject of the invention is preferably a polypeptide according to the invention, characterized in that it is a polypeptide of Listeria monocytogenes, or a fragment thereof, involved in the metabolism of fatty acids and phospholipids.

[0129] In another aspect, a subject of the invention is preferably a polypeptide according to the invention, characterized in that it is a polypeptide of Listeria monocytogenes, or a fragment thereof, involved in the metabolism of nucleotides, purines, pyrimidines or nucleosides.

[0130] In another aspect, a subject of the invention is preferably a polypeptide according to the invention, characterized in that it is a polypeptide of Listeria monocytogenes, or a fragment thereof, involved in regulatory functions.

[0131] In another aspect, a subject of the invention is preferably a polypeptide according to the invention, characterized in that it is a polypeptide of Listeria monocytogenes, or a fragment thereof, involved in the replication process.

[0132] In another aspect, a subject of the invention is preferably a polypeptide according to the invention, characterized in that it is a polypeptide of Listeria monocytogenes, or a fragment thereof, involved in the transcription process.

[0133] In another aspect, a subject of the invention is preferably a polypeptide according to the invention, characterized in that it is a polypeptide of Listeria monocytogenes, or a fragment thereof, involved in the translation process.

[0134] In another aspect, a subject of the invention is preferably a polypeptide according to the invention, characterized in that it is a polypeptide of Listeria monocytogenes, or a fragment thereof, involved in the process of transport and binding of proteins.

[0135] In another aspect, a subject of the invention is preferably a polypeptide according to the invention, characterized in that it is a polypeptide of Listeria monocytogenes, or a fragment thereof, involved in adaptation to atypical conditions.

[0136] In another aspect, a subject of the invention is preferably a polypeptide according to the invention, characterized in that it is a polypeptide of Listeria monocytogenes, or a fragment thereof, involved in sensitivity to medicinal products and analogs.

[0137] In another aspect, a subject of the invention is preferably a polypeptide according to the invention, characterized in that it is a polypeptide of Listeria monocytogenes, or a fragment thereof, involved in functions relating to transposons.

[0138] In another aspect, a subject of the invention is preferably a polypeptide according to the invention, characterized in that it is a polypeptide specific for Listeria monocytogenes, or a fragment thereof.

[0139] It is important to note, however, that a living organism is a whole entity and should be taken as such. Thus, in order to be able to develop and to exhibit its properties, any organism needs interactions between the various metabolic pathways. Thus, the classification stated above should not be considered to be limiting, a gene possibly being involved in two different metabolic pathways.

[0140] A subject of the present invention is also the nucleotide and/or polypeptide sequences according to the invention, characterized in that said sequences are recorded on a recording medium, the form and nature of which facilitate the reading, analysis and/or exploitation of said sequence(s). These media may also contain other information extracted from the present invention, in particular the analogies with already known sequences, and/or information concerning the nucleotide and/or polypeptide sequences of other microorganisms, in order to facilitate the comparative analysis and exploitation of the results obtained.

[0141] Among these said recording media, preference is given in particular to computer-readable media, such as magnetic, optical, electrical or hybrid media, in particular computer disks, CD-ROMs and computer servers. Such recording media are also a subject of the invention.

[0142] The recording media according to the invention, with the information provided, are very useful for choosing nucleotide primers or probes for determining genes in Listeria monocytogenes or strains close to this organism. Similarly, the use of these media for studying the genetic polymorphism of a strain close to Listeria monocytogenes, in particular by determining the regions of colinearity, is very useful insofar as these media provide not only the nucleotide sequence of the genome of Listeria monocytogenes egb, but also the genomic organization in said sequence. Thus, the uses of recording media according to the invention are also subjects of the invention.

[0143] The analysis of homology between various sequences is in fact advantageously performed using sequence comparison programs, such as the Blast program or the programs of the GCG package, described above.

[0144] The invention is also directed toward the cloning and/or expression vectors which contain a nucleotide sequence according to the invention. Preference is particularly given to the nucleotide sequences encoding cell envelope or surface polypeptides, or polypeptides involved in the cellular machinery, in particular secretion, central intermediate metabolism, in particular sugar production, energetic metabolism, and the processes of vitamin B12 synthesis, of transcription and translation and of polypeptide synthesis.

[0145] The vectors according to the invention preferably comprise elements which allow expression and/or secretion of the nucleotide sequences in a given host cell.

[0146] The vector should then comprise a promoter, translation initiation and determination signals, and also regions suitable for regulating transcription. It must be possible for it to be maintained stably in the host cell and it may optionally contain particular signals which specify secretion of the translated protein. These various elements are chosen and optimized by those skilled in the art depending on the cellular host used. To this effect, the nucleotide sequences according to the invention may be inserted into vectors which replicate autonomously in the host chosen, or may be vectors which integrate in the host chosen.

[0147] Such vectors are prepared by methods commonly used by those skilled in the art, and the resulting clones may be introduced into a suitable host using standard methods, such as lipofection, electroporation, heat shock or chemical methods.

[0148] The vectors according to the invention are, for example, vectors of plasmid or viral origin. They are of use in transforming host cells in order to clone or express the nucleotide sequences according to the invention.

[0149] The invention also comprises the host cells transformed with a vector according to the invention.

[0150] The cellular host may be chosen from prokaryotic or eukaryotic systems, for example bacterial cells but also yeast cells or animal cells, in particular mammalian cells. Insect cells or plant cells may also be used. The preferred host cells according to the invention are in particular prokaryotic cells, preferably bacteria belonging to the Listeria genus, to the species Listeria monocytogenes, or microorganisms associated with the species Listeria monocytogenes. The invention also relates to the animals, except humans, which comprise a transformed cell according to the invention. The transformed cells according to the invention can be used in methods for preparing recombinant polypeptides according to the invention. The methods for preparing a polypeptide according to the invention in recombinant form. characterized in that they use a vector and/or a cell transformed with a vector according to the invention, are themselves included in the present invention. Preferably, a cell transformed with a vector according to the invention is cultured under conditions which allow expression of said polypeptide, and said recombinant peptide is recovered. The host cells according to the invention may also be used for preparing food compositions, which are themselves a subject of the present invention.

[0151] As has been mentioned, the cellular host may be chosen from prokaryotic or eukaryotic systems. In particular, it is possible to identify nucleotide sequences according to the invention which facilitate secretion in such a prokaryotic or eukaryotic system. A vector according to the invention carrying such a sequence may therefore be advantageously used for producing recombinant proteins intended to be secreted. As a result, the purification of these recombinant proteins of interest will be facilitated by the fact that they are present in the cell culture supernatant rather than inside the host cells.

[0152] The polypeptides according to the invention may also be prepared by chemical synthesis. Such a method of preparation is also a subject of the invention. Those skilled in the art are aware of the methods of chemical synthesis, for example techniques using solid phases (see in particular Steward et al., 1984, Solid phase peptides synthesis, Pierce Chem. Company, Rockford, 111, 2nd ed. (1984)) or techniques using partial solid phases, by fragment condensation or by conventional synthesis in solution. The polypeptides obtained by chemical synthesis, and possibly comprising corresponding unnatural amino acids, are also included in the invention.

[0153] The invention also relates to hybrid polypeptides having at least one polypeptide, or a fragment thereof, according to the invention, and a sequence of a polypeptide capable of inducing an immune response in humans or animals.

[0154] Advantageously, the antigenic determinant is such that it is capable of inducing a humoral and/or cellular response.

[0155] Such a determinant may comprise a polypeptide, or a fragment thereof, according to the invention in a glycosylated form used for the purpose of obtaining immunogenic compositions capable of inducing the synthesis of antibodies directed against multiple epitopes. Said polypeptides, or the glycosylated fragments thereof, are also part of the invention.

[0156] These molecules may consist partly of a molecule bearing polypeptides, or fragments thereof, according to the invention, combined with an optionally immunogenic component, in particular an epitope of diphtheria toxin, tetanus toxin, a surface antigen of the hepatitis B virus (patent FR 79 21811), the VP1 antigen of the poliomyelitis virus or any other viral or bacterial antigen or toxin.

[0157] The methods for synthesizing the hybrid molecules encompass the methods used in genetic engineering for constructing hybrid nucleotide sequences encoding the desired polypeptide sequences. Reference may, for example, advantageously be made to the technique for obtaining genes encoding fusion proteins, described by Minton in 1984.

[0158] Said hybrid nucleotide sequences encoding a hybrid polypeptide and also the hybrid polypeptides according to the invention, characterized in that they are recombinant polypeptides obtained by expressing said hybrid nucleotide sequences, are also part of the invention.

[0159] The invention also comprises the vectors characterized in that they contain one of said hybrid nucleotide sequences. The host cells transformed with said vectors, the transgenic animals comprising one of said transformed cells and also the methods for preparing recombinant polypeptides using said vectors, said transformed cells and/or said transgenic animals are, of course, also part of the invention.

[0160] The coupling between a polypeptide according to the invention and an immunogenic polypeptide may be carried out chemically or biologically. Thus, according to the invention, it is possible to introduce one or more attachment elements, in particular amino acids, so as to facilitate the reactions for coupling between the polypeptide according to the invention and the immunostimulatory polypeptide, the covalent coupling of the immunostimulatory antigen possibly taking place at the N— or C-terminal end of the polypeptide according to the invention. Bifunctional reagents for this coupling are determined as a function of the end chosen for carrying out this coupling, and the coupling techniques are well known to those skilled in the art.

[0161] The conjugates derived from a peptide coupling may be prepared by genetic recombination. The hybrid peptide (conjugate) may in effect be produced by recombinant DNA techniques, by insertion or addition of a sequence encoding the antigenic, immunogenic or hapten peptide(s) into or to the DNA sequence encoding the polypeptide according to the invention. These techniques for preparing hybrid peptides by genetic recombination are well known to those skilled in the art (see, for example, Makrides, 1996, Microbiological Reviews 60, 512-538).

[0162] Preferably, said immune polypeptide is chosen from the group of peptides containing toxoids, in particular diphtheria toxoid or tetanus toxoid, streptococcus-derived proteins (such as the human serum albumin-binding protein), OMPA membrane proteins and outer membrane protein complexes, outer membrane vesicles or heat shock proteins.

[0163] The hybrid polypeptides according to the invention are very useful for obtaining monoclonal or polyclonal antibodies capable of specifically recognizing the polypeptides according to the invention. In fact, a hybrid polypeptide according to the invention allows potentiation of the immune response, against the polypeptide according to the invention coupled to the immunogenic molecule. Such monoclonal or polyclonal antibodies, fragments thereof or the chimeric antibodies, which recognize the polypeptides according to the invention, are also subjects of the invention.

[0164] The specific monoclonal antibodies may be obtained according to the conventional method of hybridoma culturing described by Köhler and Milstein (1975, Nature 256, 495).

[0165] The antibodies according to the invention are, for example, chimeric antibodies, humanized antibodies, or Fab or F(ab′)² fragments. It may also be in the form of an immunoconjugate or of an antibody which is labeled in order to obtain a detectable and/or quantifiable signal.

[0166] Thus, the antibodies according to the invention may be used in a method for depicting and/or identifying bacteria belonging to the species Listeria monocytogenes, or to an associated microorganism, in a biological sample, characterized in that it comprises the following steps:
[0167] a) bringing the biological sample into contact with an antibody according to the invention;
[0168] b) demonstrating the antigen-antibody complex possibly formed.

[0169] The antibodies according to the present invention can also be used in order to detect expression of a gene of Listeria monocytogenes or of associated microorganisms. Specifically, the presence of the expression product of a gene recognized by an antibody specific for said expression product can be detected via the presence of an antigen-antibody complex formed after the Listeria monocytogenes strain or the associated microorganism has been brought into contact with an antibody according to the invention. The bacterial strain used may have been “prepared”, i.e. centrifuged, lyzed, and placed in an appropriate reagent for constituting the medium suitable for the immunoreaction. In particular, preference is given to a method for detecting the expression in the gene corresponding to a Western blot, which may be performed after polyacrylamide gel electrophoresis of a lysate of the bacterial strain, in the presence or absence of reducing conditions (SDS-PAGE). After migration and separation of the proteins on the polyacrylamide gel, said proteins are transferred onto a suitable membrane (for example made of nylon) and the presence of the protein or of the polypeptide of interest is detected by bringing said membrane into contact with an antibody according to the invention.

[0170] Thus, the present invention also comprises the kits or packs for carrying out a method as described (for detecting the expression of a gene of Listeria monocytogenes, or an associated microorganism, or for detecting and/or identifying bacteria belonging to the species Listeria monocytogenes, or an associated microorganism), comprising the following elements:
[0171] a) a polyclonal or monoclonal antibody according to the invention;
[0172] b) optionally, the reagents for constituting the medium suitable for the immunoreaction;
[0173] c) optionally, the reagents for demonstrating the antigen-antibody complexes produced by the immunoreaction.

[0174] The polypeptides and the antibodies according to the invention may advantageously be immobilized on a support, in particular a protein chip. Such a protein chip is a subject of the invention and may also contain at least one polypeptide of a microorganism other than Listeria monocytogenes, or an antibody directed against a compound of a microorganism other than Listeria monocytogenes.

[0175] The protein chips or high density filters containing proteins according to the invention may be constructed in the same way as the DNA chips according to the invention. In practice, it is possible to carry out the synthesis of the polypeptides attached directly to the protein chip, or to carry out an ex situ synthesis followed by a step of attaching the synthesized polypeptide to said chip. The latter method is preferable when the intention is to attach proteins of considerable size to the support, which are advantageously prepared by genetic engineering. However, if the intention is to attach only peptides to the support of said chip, it may be more advantageous to synthesize said peptides directly in situ.

[0176] The protein chips according to the invention may advantageously be used in kits or packs for detecting and/or identifying bacteria associated with the species Listeria monocytogenes, or with a microorganism, or more generally in kits or packs for detecting and/or identifying microorganisms. When the polypeptides according to the invention are attached to DNA chips, the presence of antibodies in the samples tested is sought, the attachment of an antibody according to the invention to the support of the protein chip allowing identification of the protein for which said antibody is specific.

[0177] Preferably, an antibody according to the invention is attached to the support of the protein chip and the presence of the corresponding antigen, specific for Listeria monocytogenes, or for an associated microorganism, is detected.

[0178] A protein chip described above may be used for detecting gene products, in order to establish an expression profile for said genes, in addition to a DNA chip according to the invention.

[0179] The protein chips according to the invention are also extremely useful for proteomic experiments, which study interactions between the various proteins of a given microorganism. In a simplified manner, peptides representative of the various proteins of an organism are attached to a support. Said support is brought into contact with labeled proteins and, after an optional rinsing step, interactions between said labeled proteins and the peptides attached to the protein chip are detected.

[0180] Thus, the protein chips comprising a polypeptide sequence according to the invention are an antibody according to the invention are a subject of the invention, as are the kits or packs containing them.

[0181] The present invention also covers a method for detecting and/or identifying bacteria belonging to the species Listeria monocytogenes, or to an associated microorganism, in a biological sample, which uses a nucleotide sequence according to the invention.

[0182] It should be clearly understood that, in the present invention, the term “biological sample” concerns samples taken from a living organism (in particular blood, tissues, organs or other samples taken from a mammal) or a sample containing biological material, i.e. DNA. Such a biological sample therefore encompasses food compositions containing bacteria (for example cheeses, dairy products), but also food compositions containing yeast (beers, breads) or others.

[0183] The method for detection and/or identification using the nucleotide sequences according to the invention may be diverse in nature.

[0184] A method comprising the following steps is preferred:
[0185] a) optionally isolating the DNA from the biological sample to be analyzed, or obtaining a cDNA from the RNA of the biological sample;
[0186] b) specifically amplifying the DNA of bacteria belonging to the species Listeria monocytogenes, or to an associated microorganism, using at least one primer according to the invention;
[0187] c) demonstrating the amplification products.

[0188] This method is based on the specific amplification of the DNA, in particular via a polymerase chain reaction.

[0189] A method comprising the following steps is also preferred:
[0190] a) bringing a nucleotide probe according to the invention into contact with a biological sample, the nucleic acid contained in the biological sample having, where appropriate, been previously made accessible to hybridization, under conditions which allow hybridization of the probe to the nucleic acid of a bacterium belonging to the species Listeria monocytogenes, or to an associated microorganism;
[0191] b) demonstrating the hybrid possibly formed between the nucleotide probe and the DNA of the biological sample.

[0192] Such a method should not be limited to detecting the presence of the DNA contained in the biological sample in question, it may also be used to detect the RNA contained into said sample. This method in particular encompasses Southern and Northern blotting.

[0193] Another preferred method according to the invention comprises the following steps:
[0194] a) bringing a nucleotide probe immobilized on a support according to the invention into contact with a biological sample, the nucleic acid of the sample having, where appropriate, previously been made accessible to hybridization, under conditions which allow hybridization of the probe to the nucleic acid of a bacterium belonging to the species Listeria monocytogenes, or to an associated microorganism;
[0195] b) bringing the hybrid formed between the nucleotide probe immobilized on a support and the nucleic acid contained in the biological sample, where appropriate after removing the DNA of the biological sample which has not hybridized with the probe, into contact with a labeled nucleotide probe according to the invention;
[0196] c) demonstrating the new hybrid formed in step b).

[0197] This method is advantageously used with a DNA chip according to the invention, the nucleic acid being sought hybridizing with a probe present at the surface of said chip, and being detected using a labeled probe. This method is advantageously carried out by combining a prior step of amplifying the DNA or the complementary DNA optionally obtained by reverse transcription, using primers according to the invention.

[0198] Thus, the present invention also encompasses the kits or packs for detecting and/or identifying bacteria belonging to the species Listeria monocytogenes, or to an associated microorganism, characterized in that it comprises the following elements:
[0199] a) a nucleotide probe according to the invention;
[0200] b) optionally, the reagents required for carrying out a hybridization reaction;
[0201] c) optionally, at least one primer according to the invention and also the reagents required for a DNA amplification reaction.

[0202] Similarly, the present invention also encompasses the kits or packs for detecting and/or identifying bacteria belonging to the species Listeria monocytogenes, or to an associated microorganism, characterized in that it comprises the following elements:
[0203] a) a nucleotide probe, termed capture probe, according to the invention;
[0204] b) an oligonucleotide probe, termed detection probe, according to the invention;
[0205] c) optionally, at least one primer according to the invention and also the reagents required for a DNA amplification reaction.

[0206] Finally, the kits or packs for detecting and/or identifying bacteria belonging to the species Listeria monocytogenes, or to an associated microorganism, characterized in that it comprises the following elements:
[0207] a) at least one primer according to the invention;
[0208] b) optionally, the reagents required for carrying out a DNA amplification reaction;
[0209] c) optionally, a component for verifying the sequence of the amplified fragment, more particularly an oligonucleotide probe according to the invention,
[0210] are also subjects of the present invention.

[0211] Preferably, said primers and/or probes and/or polypeptides and/or antibodies according to the present invention, used in the methods and/or kits or packs according to the present invention, are chosen from the primers and/or probes and/or polypeptides and/or antibodies specific for the species Listeria monocytogenes. Preferably, these elements are chosen from the nucleotide sequences encoding a secreted protein, from the secreted polypeptides, or from the antibodies directed against secreted polypeptides of Listeria monocytogenes.

[0212] A subject of the present invention is also the strains of Listeria monocytogenes, and/or of associated microorganisms, containing one or more mutation(s) in a nucleotide sequence according to the invention, in particular an ORF sequence, or regulatory elements thereof (in particular promoters).

[0213] According to the invention, preference is given to the strains of Listeria monocytogenes having one or more mutation(s) in the nucleotide sequences encoding polypeptides involved in the cellular machinery, in particular secretion, central intermediate metabolism, energetic metabolism, and processes of amino acid synthesis, of transcription and translation, and of polypeptide synthesis.

[0214] Said mutations may lead to inactivation of this gene or, in particular when they are located in the regulatory elements of said gene, to overexpression of this gene.

[0215] The invention also relates to the use of a nucleotide sequence according to the invention, of a polypeptide according to the invention, of an antibody according to the invention, of a cell according to the invention and/or of a transformed animal according to the invention, for selecting an organic or inorganic compound capable of modulating, regulating, inducing or inhibiting gene expression, and/or of modifying cell replication in eukaryotic or prokaryotic cells, or capable of inducing, inhibiting or worsening pathological conditions linked to an infection with Listeria monocytogenes, or a microorganism associated therewith.

[0216] The invention also comprises a method for selecting compounds capable of binding to a polypeptide, or a fragment thereof, according to the invention, capable of binding to a nucleotide sequence according to the invention, or capable of recognizing an antibody according to the invention, and/or capable of modulating, regulating, inducing or inhibiting gene expression, and/or modifying the cell growth or replication in eukaryotic or prokaryotic cells, or capable of inducing, inhibiting or worsening, in an animal or human organism, pathological conditions linked to an infection with Listeria monocytogenes, or a microorganism associated therewith, characterized in that it comprises the following steps:
[0217] a) bringing said compound into contact with said polypeptide or said nucleotide sequence or with a transformed cell according to the invention and/or administering said compound to a transformed animal according to the invention;
[0218] b) determining the ability of said compound to bind to said polypeptide or said nucleotide sequence, or to modulate, regulate, induce or inhibit gene expression, or to modulate cell growth or replication, or to induce, inhibit or worsen, in said transformed animal, pathological conditions linked to an infection with Listeria monocytogenes or a microorganism associated therewith.

[0219] The transformed cells and/or animals according to the invention may advantageously serve as a model and be used in methods for studying, identifying and/or selecting compounds which may be responsible for pathological conditions induced or worsened by Listeria monocytogenes, or which may prevent and/or treat these pathological conditions, such as, for example, genital, eye or systemic diseases, in particular diseases of the lymphatic system. In particular, the transformed host cells, especially the bacteria of the Listeriae family, the transformation of which with a vector according to the invention may, for example, increase or inhibit its infectious capacity, or modulate the pathological conditions usually induced or worsened by the infection, may be used to infect animals in which the appearance of the pathological conditions will be monitored. These nontransformed animals, infected, for example, with transformed Listeriae bacteria, may serve as a study model. In the same way, the transformed animals according to the invention may be used in methods for selecting compounds capable of preventing and/or treating diseases due to Listeria. Said methods using said transformed cells and/or transformed animals are part of the invention.

[0220] The compounds liable to be selected may be organic compounds, such as polypeptides or carbohydrates, or any other already known organic or inorganic compounds, or new organic compounds developed using molecular modeling techniques and obtained by chemical or biochemical synthesis, these techniques being known to those skilled in the art.

[0221] Said selected compounds may be used for modulating cell growth and/or replication in Listeria monocytogenes, or any other associated microorganism, and also for controlling infection with these microorganisms. Said compounds according to the invention may also be used for modulating cell growth and/or replication in any eukaryotic or prokaryotic cells, in particular tumor cells and infectious microorganisms, for which said compounds will prove to be active, the methods for determining said modulations being well known to those skilled in the art.

[0222] The expression “compound capable of modulating the growth of a microorganism” is intended to denote any compound making it possible to intervene in, modify, limit and/or reduce the development, growth, rate of proliferation and/or viability of said microorganism.

[0223] This modulation may be carried out, for example, using an agent capable of binding to a protein and thus of inhibiting or potentiating its biological activity, or capable of binding to an outer surface membrane protein of a microorganism and blocking the penetration of said microorganism into the host cell or promoting the action of the immune system of the infected organism, directed against said microorganism. This modulation may also be carried out using an agent capable of binding to a nucleotide sequence of a DNA or RNA of a microorganism and blocking, for example, the expression of a polypeptide the biological or structural activity of which is necessary for the growth or for the reproduction of said microorganism.

[0224] In the present invention, the term “associated microorganism” is intended to denote any microorganism in which the gene expression may be modulated, regulated, induced or inhibited, or the cell growth or replication of which may also be modulated, by a compound of the invention. In the present invention, the term “associated microorganism” is also intended to denote any microorganism comprising nucleotide sequences or polypeptides according to the invention. These microorganisms may, in certain cases, comprise polypeptides or nucleotide sequences identical or homologous to those of the invention [lacuna] may also be detected and/or identified using the methods or kit for detection and/or identification according to the invention and may also serve as a target for the compounds of the invention.

[0225] The invention relates to the compounds which may be selected using a election method according to the invention.
[0226] The invention also relates to a pharmaceutical composition comprising a compound chosen from the following compounds:
[0227] a) a nucleotide sequence according to the invention;
[0228] b) a polypeptide according to the invention;
[0229] c) a vector according to the invention;
[0230] d) an antibody according to the invention; and
[0231] e) a compound which may be selected using a selection method according to the invention, optionally in combination with a pharmaceutically acceptable vehicle.

[0232] The term “effective amount” is intended to denote a sufficient amount of said compound or antibody, or of polypeptide of the invention, for modulating the growth of Listeria monocytogenes or of an associated microorganism.

[0233] The invention also relates to a pharmaceutical composition according to the invention, for preventing or treating an infection with a bacterium belonging to the species Listeria monocytogenes , or with an associated microorganism.

[0234] The invention is also directed toward an immunogenic and/or vaccinal composition, characterized in that it comprises one or more polypeptides according to the invention and/or one or more hybrid polypeptides according to the invention.

[0235] The invention also comprises the use of a transformed cell according to the invention, for preparing a vaccinal composition.

[0236] The invention is also directed toward a vaccinal composition, characterized in that it contains a nucleotide sequence according to the invention, a vector according to the invention and/or a transformed cell according to the invention.

[0237] The invention also relates to the vaccinal compositions according to the invention, for preventing or treating an infection with a bacterium belonging to the species Listeria monocytogenes, or with an associated microorganism.

[0238] Preferably, the immunogenic and/or vaccinal compositions according to the invention intended for the prevention and/or treatment of infection with Listeria monocytogenes, or with an associated microorganism will be chosen from the immunogenic and/or vaccinal compositions comprising a polypeptide, or a fragment thereof, corresponding to a protein, or a fragment thereof, of the cell envelope of Listeria monocytogenes. The vaccinal compositions comprising nucleotide sequences will preferably also comprise nucleotide sequences encoding a polypeptide, or a fragment thereof, corresponding to a protein, or a fragment thereof, of the cell envelope of Listeria monocytogenes.

[0239] Among these preferred immunogenic and/or vaccinal compositions, the most preferred are those comprising a polypeptide, or a fragment thereof, or a nucleotide sequence, or a fragment thereof, the sequences of which are chosen from the nucleotide or amino acid sequences identified in this functional group and listed previously.

[0240] The polypeptides of the invention, or the fragments thereof, which are part of the immunogenic compositions according to the invention may be selected using techniques known to those skilled in the art, such as, for example, the ability of said polypeptides to stimulate T cells, which, for example, causes the proliferation thereof or the secretion of interleukins, and which results in the production of antibodies directed against said polypeptides.

[0241] In mice, to which a weight dose of the vaccinal composition comparable to the dose used in humans is administered, the antibody reaction is tested by taking a serum sample and then studying the formation of a complex between the antibodies present in the serum and the antigen of the vaccinal composition, according to usual techniques.

[0242] According to the invention, said vaccinal compositions will preferably be in combination with a pharmaceutically acceptable vehicle and, where appropriate, with one or more suitable adjuvants of immunity.

[0243] Today, various types of vaccine are available for protecting humans against infectious diseases: attenuated live microorganisms (M. bovis—BCG for tuberculosis), inactive microorganisms (flu virus), acellular extracts (Bordetella pertussis for whooping cough), recombined proteins (hepatitis B virus surface antigens) and polysaccharides (pneumococci). Vaccines prepared from synthetic peptides or from genetically modified microorganisms expressing heterologous antigens are undergoing experimentation. Even more recently, recombined plasmid DNAs carrying genes encoding protective antigens have been proposed as an alternative vaccinal strategy. This type of vaccination is performed with a particular plasmid derived from an E. coli plasmid which does not replicate in vivo and which encodes only the immunizing protein. Animals have been immunized by simply injecting the naked plasmid DNA into muscle. This technique leads to the expression of the immunizing protein in situ and to an immune response of the cellular type (CTL) and of the humoral type (antibodies). This double induction of the immune response is one of the main advantages of the technique of vaccination with naked DNA.

[0244] The vaccinal compositions comprising nucleotide sequences or vectors into which said sequences are inserted are in particular described in international application No. WO 90/11092 and also in international application No. WO 95/11307.

[0245] The nucleotide sequence constituting the vaccinal composition according to the invention may be injected into the host after having been coupled to compounds which promote penetration of this polynucleotide into the cell or its transport as far as the cell nucleus. The resulting conjugates may be encapsulated in polymeric microparticles, as described in international application No. WO 94/27238 (Medisorb Technologies International).

[0246] According to another embodiment of the vaccinal composition according to the invention, the nucleotide sequence, preferably a DNA, is complexed with DEAE-dextran, with nuclear proteins or with lipids, or encapsulated in liposomes, or alternatively introduced in the form of a gel which facilitates its transfection into cells. The polynucleotide or the vector according to the invention may also be in suspension in a buffer solution or may be associated with liposomes.

[0247] Advantageously, such a vaccine will be prepared in accordance with the technique described by Tacson et al. or Huygen et al. in 1996, or else in accordance with the technique described by Davis et al. in international application No. WO 95/11307.

[0248] Such a vaccine may also be prepared in the form of a composition containing a vector according to the invention, placed under the control of regulatory elements for its expression in humans or animals. As a vector for in vivo expression of the polypeptide antigen of interest, use may, for example, be made of the plasmid pcDNA3 or the plasmid pcDNA1/neo, both marketed by Invitrogen (R & D Systems, Abi\overline{ng}don, United Kingdom). Such a vaccine will advantageously comprise, besides the recombinant vector, a saline solution, for example a sodium chloride solution.

[0249] The expression “pharmaceutically acceptable vehicle” is intended to denote a compound, or a combination of compounds, included in a pharmaceutical or vaccinal composition, which does not cause any side reactions and which makes it possible, for example, to facilitate administration of the active compound, to increase the lifetime thereof and/or the effectiveness thereof in the organism, to increase the solubility thereof in solution or else to improve the conservation thereof. These pharmaceutically acceptable vehicles are well known and will be adjusted by those skilled in the art depending on the nature and on the method of administration of the active compound chosen.

[0250] With regard to the vacinnal formulations, they may comprise suitable adjuvants of immunity which are known to those skilled in the art, such as, for example, aluminum hydroxide, a representative of the muramyl peptide family, such as one of the peptide derivatives of N-acetylmuramyl, a bacterial lyzate, or incomplete Freund's adjuvant.

[0251] Preferably, these compounds will be administered systemically, in particular intravenously, intramuscularly, intradermally or subcutaneously, or orally. More preferably, the vaccinal composition comprising polypeptides according to the invention will be administered several times, spread out over time, intradermally or subcutaneously.

[0252] The optimal methods of administration, doses and pharmaceutical forms of these compounds can be determined according to the criteria generally taken into account in establishing a suitable treatment for a patient, such as, for example, the age or body weight of the patient, the seriousness of his or her general condition, the tolerance to the treatment and the side effects noted.

[0253] The invention comprises the use of a composition according to the invention, for treating or preventing genital diseases induced or worsened by Listeria monocytogenes.

[0254] Finally, the invention comprises the use of a composition according to the invention, for treating or preventing diseases induced or worsened by the presence of Listeria monocytogenes.

[0255] Finally, the invention comprises the use of a composition according to the invention, for treating or preventing systemic diseases, in particular diseases of the lymphatic system, induced or worsened by the presence of Listeria monocytogenes.

[0256] Moreover, a subject of the present invention is also a genomic DNA library of a bacterium of the Listeria genus, preferably Listeria monocytogenes, preferably the EGD-e strain, said DNA library being cloned in bacterial artificial chromosomes (BACs). Such a genomic DNA library contains very large inserts of the Listeria genome, in particular inserts of between 50 and 200 kb in length.

[0257] One of the advantages of using the BAC system compared to a cosmid system is that there is only one or a maximum of two copies of the plasmids used per transformed cell, which decreases the potential for recombination between DNA fragments and, more importantly, which eliminates the risk of lethal overexpression of bacterial cloned genes. However, the presence of the BAC as a single copy means that the plasmid DNA must be extracted from a large volume of culture in order to obtain sufficient DNA for the sequence. In addition, the stability and fidelity with which the clones are maintained in a BAC library allows the identification of genomic differences between various Listeria strains, and the identification of these genetic differences which may be responsible for the phenotypic variations observed between the various strains.

[0258] The genomic DNA library described in the present invention, in particular the LM_baclim library deposited with the CNCM [National Collection of Microorganism Cultures] on Apr. 11, 2000, under the number I-2439, in fact covers the Listeria monocytogenes genome. However, although certain regions could not be cloned into said library, due to problems of lethality in Escherichia coli, these regions can easily be amplified and identified by those skilled in the art, using oligonucleotides specific for the sequences of the ends of the various clones which form the contigs.

[0259] The present invention also relates to the methods for isolating a polynucleotide of interest present in a strain of Listeria and absent from another strain, which use as at least one DNA library based on a BAC, containing the Listeria genome. The method according to the invention for isolating a polynucleotide of interest may comprise the following steps:
[0260] a) isolating at least one polynucleotide contained in a clone from the DNA library based on a BAC, of listeria origin;
[0261] b) isolating:
[0262] at least one genomic polynucleotide or cDNA of a listeria, said listeria belonging to a strain which is different from the strain used to construct the BAC DNA library of step a) or, alternatively,
[0263] at least one polynucleotide contained in a clone from a DNA library based on a BAC prepared from the genome of a listeria which is different from the listeria used to construct the DNA library based on the BAC of step a);
[0264] c) hybridizing the polynucleotide of step a) to the polynucleotide of step b);
[0265] d) selecting the polynucleotides of step a) which have not formed a hybridization complex with the polynucleotides of step b);
[0266] e) characterizing the polynucleotide selected.

[0267] The polynucleotide of step a) may be prepared by digesting at least one recombinant BAC clone with a suitable restriction enzyme and, optionally, amplifying the polynucleotide insert which results therefrom.

[0268] Thus, the method of the invention allows those skilled in the art to perform comparative genomic studies between the various strains or species of the listeria genus, for example between the pathogenic strains and their nonpathogenic equivalents.

[0269] In particular, it is possible to study and determine the regions of polymorphism between said strains.

### EXAMPLES

### Example 1

### Production of the BAC Library of Listeria monocytogenes DNA

[0270] Blocks containing the chromosomal DNA of Listeria monocytogenes, with an average weight of 80 mg, were prepared in agarose using methods known to those skilled in the art. They were kept in a solution of 500 mM EDTA, pH 8.0.

[0271] 8 blocks are used to construct the library. These agarose blocks are washed twice for 30 min on ice in TE/PMSF (10 mM Tris-HCl, pH 8.0; 1 mM EDTA; 100 μM PMSF). The agarose blocks are then washed twice for 30 min on ice in TE (10 mM Tris-HCl, pH 8.0; 1 mM EDTA). Each agarose block is cut into eight thin slices, and sixteen slices are placed together in a single tube. The blocks are then incubated in a preincubation solution (20 μM spermidine, 5 mM DTT, 1×restriction buffer) for 40 min on ice. The preincubation buffer is changed once and incubated for a further 40 min.

[0272] The partial digestions are carried out in a digestion buffer (2 mM spermidine, 0.5 mM DTT, 0.02 μg BSA, 0.5×restriction buffer) for 30 min at 4° C., with no restriction enzyme, and then 0.1, 0.25, 0.4 or 0.5 units of EcoRI (Life Tech) per tube are added for 2 h at 37° C. The partial digestion is stopped by replacing the digestion buffer with 200 μl of 0.5M EDTA, the tubes being placed on ice.

[0273] The agarose blocks are then placed on a 1% SeaKem GTG agarose (FMC) gel containing 0.5×TBE buffer. Pulsed field gel electrophoresis is then carried out with the following conditions:
[0274] initial pulse time: 90 seconds,
[0275] final pulse time: 90 seconds,
[0276] 6 V/cm,
[0277] included angle: 120°,
[0278] gel time: 16 h, 12° C.

[0279] The region between 50 and 200 kb is cut from the gel and separated into three pieces (50-100 kb, 100-150 kb, 150-200 kb). The gel for cloning should not be stained with ethidium bromide.

[0280] These agarose blocks are placed in a new 1% SeaKem GTG agarose (FMC) gel containing 0.5×TBE buffer. A further pulsed field gel electrophoresis is performed with the following conditions:
[0281] initial pulse time: 5 seconds,
[0282] final pulse time: 5 seconds,
[0283] 4 V/cm,
[0284] included angle: 120°,
[0285] gel time: 15 h, 12° C.

[0286] The region between 50 and 200 kb is again cut out, without having stained the DNA with ethidium bromide, and separated into three pieces (50-100 kb, 100-150 kb, 150-200 kb).

[0287] The pieces of agarose are cut into small pieces, each of approximately 100 mg.

[0288] The agarose is incubated at 67° C. for 10 min and then cooled to 42° C., and 1 μl of beta-agarose (FMC, 1 U/μl) is added. The mixture is incubated for 30 min at 42° C., and the beta-agarose is denatured, after complete digestion of the agarose, by incubation for 10 min at 67° C. and then incubation on ice.

[0289] 150 ng of DNA vectors digested with EcoRI and phosphorylated (CIP, Roche) are used to construct the BAC library. The vector pBelaBAC-Kan (Mozo et al., Mol. Gen. Genet., 1998, 258, 562-70) is used to construct said library. 150 ng of said vector are therefore incubated with 150 ng of DNA inserts, in a 1×ligation buffer with 5 units of ligase (USB 1 unit/μl) for 16 h at 12° C.

[0290] The ligation buffer is the buffer recommended by the manufacturer.

[0291] The transformation is carried out by adding 5 μl of the ligation reaction to 40 μl of DH10B electrocompetent cells, and the electroporation is performed in a Life Tech electroporator with the following conditions:
[0292] 330 μF, 4 kΩ, DC volts: lowΩ, charge rate: fast, 1.5 mm electroporation cuvette.

[0293] 1 mm of SOC culture medium is added to the cells, which are incubated for 45 min at 37° C. The cells are then plated out on a dish containing LB agar and which also contains 30 g/ml of kanamycin, 100 μg/ml of IPTG and 40 μg/ml of X-Gal. The recombinant cells which are white compared to the blue cells are selected, and the BAC library is characterized by preparing restriction maps for each of the clones thus obtained.

### Example 2

### Annotations and Analysis of the Genomic Sequence of Listeria monocytogenes

[0294] Bioinformatics has a key role in the three phases of a genome project: shotgun follow-up of the inserts produced using the random sequencing method, genome sequence closure phase, and annotations. The inventors have developed a complete software package which makes it possible to satisfy these three requirements: GMP-Tool-box (GMPTB).

[0295] Shotgun follow-up: During the random sequencing procedure, GMPTB extracts from the results files (Phrap format) or the characteristics required for the assembly (number of contigs, number of sequences, etc) and displays them in a table. This table may be used to create graphics which show the progression of this method and which allow rapid identification of the assembly problems. Importantly, GMPTB allows comparison between the assembly results and creates an HTML page to explain the relationship between new and old contigs (fusion, creation, etc).

[0296] Sequence closure phase: Various strategies are used by GMPTB to predict links between contigs. GMPTB in particular searches for all the clones which allow links, on the basis of the location and of the orientation of the terminal sequences. It can also indicate misassemblies. GMPTB can also predict links, on the basis of genome comparisons, by searching for similarities between the ends of the contigs and other genomic sequences (at nucleotide and amino acid level).

[0297] Annotations: GMPTB makes it possible to begin the annotation during the terminal phase. In fact, GMPTB creates an individual protein file (IPF) for each open reading frame (ORF) at the time of assembly. These are text files in a specific format which contain three categories of fields:
[0298] the minimum fields contain an identification number, a version number, location and sequences. The nucleotide sequence exported corresponds to the sequence of the open reading frame with 500 additional bases before the first stop codon and 200 additional bases after the second stop.
[0299] the automatic field contains results added to the IPF by different programs. It concerns the DNA sequence (search for ribosome binding sites, promoters or terminators, coding capacity, etc) and the predicted protein sequence (homology, domain, etc).
[0300] the manual field contains results and comments added by the users. After a new assembly, GMPTB extracts all the ORFs and creates new IPFs according to the IPF sequences derived from the previous assemblies. GMPTB recognizes the modified IPFs which are the only ones used for a new automatic analysis after each assembly.

[0301] The specificity of this strategy is that the annotation of the IPFs is independent of the assembly step, unless its sequence is modified. The IPFs are connected to a Sybases genomic databank (of the SubtiList model) and are accessible via a web server. They can be modified and annotated by different inventors during the genome project phase.

Depositing of Biological Material

[0302] The following organisms were deposited, on Apr. 11, 2000, at the Collection Nationale de Cultures de Microorganismes (CNCM) [National Collection of Microorganism Cultures], 25 rue du Docteur Roux, 75724 Paris Cedex 15, France, according to the provisions of the Treaty of Budapest:
[0303] Listeria monocytogenes strain EGD-e, number I-2440;

[0304] BAC library of Listeria DNA (145 clones), LM-baclib, number I-2439. Said BAC library (1-2439) was produced in the E. coli strain DH10B (Grant et al., PNAS, 87, 4645, 1990), constructed after partial digestion of the Listeria monocytogenes DNA with the EcoRI enzyme in the vector pBelaBAC-Kan (Mozo et al., Mol. Gen. Genet., 1998, 258, 562-70).

TABLE 1

| | | Location of nucleic acid | | |
|---|---|---|---|---|
| | | sequence of the ORF on | | |
| SEQ ID | Name | SEQ ID NO. 1 | | Function |
| SEQ ID NO. 2 | LM-1000.1 | From 589066 | to 589362 | Unknown, peptdidoglycan |
| | | | | bound protein (LPXTG |
| | | | | motif) |
| SEQ ID NO. 3 | LM-1002.1 | From 587012 | to 589033 | Unknown, similar to |
| | | | | internalin protein |
| SEQ ID NO. 4 | LM-1050.1 | From 2907153 | to 2909708 | Unknown, LPXTG protein |
| | | | | with LRR repeats |
| SEQ ID NO. 5 | LM-1179.1 | From 761552 | to 763468 | Unknown, putative |
| | | | | peptidoglycan bound protein |
| | | | | (LPXTG motif) |
| SEQ ID NO. 6 | LM-118.2 | From 2787416 | to 2788363 | Unknown, peptidoglycan |
| | | | | anchored protein (LPXTG |
| | | | | motif) |
| SEQ ID NO. 7 | LM-1235.1 | From 875721 | to 881855 | Unknown, surface protein |
| | | | | (LPXTG motif) |
| SEQ ID NO. 8 | LM-1248.1 | From 865530 | From | unknown, surface protein |
| | | | 865530 | (LPXTG motif) |
| SEQ ID NO. 9 | LM-1248.1 | From 865530 | From | unknown, surface protein |
| | | | 865530 | (LPXTG motif) |
| SEQ ID NO. 10 | LM-1305.1 | From 919020 | to 920408 | Unknown, similar to wall |
| | | | | associated protein |
| | | | | precursor (LPXTG motif) |
| SEQ ID NO. 11 | LM-1490.1 | From 649864 | to 651633 | Unknown, similar to |
| | | | | internalin proteins |
| SEQ ID NO. 12 | LM-1514.1 | From 664242 | to 668990 | Unknown, peptidoglycan |
| | | | | bound protein (LPXTG |
| | | | | motif) similar to adhesion |
| SEQ ID NO. 13 | LM-1660.3 | From 501312 | to 501617 | Unknown |
| SEQ ID NO. 14 | LM-1738.1 | From 547520 | to 549337 | Unknown, similar to |
| | | | | internalin proteins |
| SEQ ID NO. 15 | LM-1756.2 | From 2679599 | to 2681125 | Unknown, surface protein |
| | | | | (GW repeat) similar to |
| | | | | N-acetylmuramidase |
| SEQ ID NO. 16 | LM-1778.1 | From 1442368 | to 1443687 | Unknown, putative |
| | | | | peptidoglycan bound protein |
| | | | | (LPXTG motif) |
| SEQ ID NO. 17 | LM-1972.3 | From 1313654 | to 1315435 | Unknown, similar to |
| | | | | internalin proteins |
| SEQ ID NO. 18 | LM-1974.3 | From 1315767 | to 1317563 | Unknown, similar to |
| | | | | internalin proteins |
| SEQ ID NO. 19 | LM-2137.2 | From 360936 | to 366272 | Unknown, similar to |
| | | | | internalin proteins |
| SEQ ID NO. 20 | LM-229.1 | From 1170002 | to 1171621 | Unknown, putative |
| | | | | interanlin, similar to InlA |
| SEQ ID NO. 21 | LM-2323.1 | From 344850 | to 346049 | Unknown, similar to surface |
| | | | | proteins |
| SEQ ID NO. 22 | LM-2435.1 | From 159663 | to 161378 | Unknown, surface anchored |
| | | | | protein (LPXTG motif) |
| SEQ ID NO. 23 | LM-2438.1 | From 157089 | to 159470 | Unknown, surface anchored |
| | | | | protein (LPXTG motif) |
| SEQ ID NO. 24 | LM-2503.1 | From 2108500 | to 2109603 | Unknown, putative cell |
| | | | | surface protein, similar to |
| | | | | internalin proteins |
| SEQ ID NO. 25 | LM-2504.1 | From 2106329 | to 2108209 | Unknown, putative |
| | | | | peptidoglycan bound protein |
| | | | | (LPXTG motif) |
| SEQ ID NO. 26 | LM-3009.3 | From 1149887 | to 1152475 | Unknown, similar to |
| | | | | fibrinogen-binding protein |
| | | | | (LPXTG motif) |
| SEQ ID NO. 27 | LM-311.2 | From 131419 | to 133773 | Unknown, similar to 5- |
| | | | | nucleotidase (LPXTG motif) |
| SEQ ID NO. 28 | LM-3144.1 | From 351459 | to 355505 | Unknown, similar to cell |
| | | | | surface proteins (LPXTG |
| | | | | motif) |
| SEQ ID NO. 29 | LM-3369.1 | From 1869532 | to 1872243 | Unknown, putative |
| | | | | peptidoglycan bound protein |
| | | | | (LPXTG motif) |
| SEQ ID NO. 30 | LM-3418.2 | From 1717193 | to 1722328 | Unknown, peptidoglycan |
| | | | | linked protein (LPxTG) |
| SEQ ID NO. 31 | LM-3477.1 | From 828168 | to 830108 | Unknown, similar to |
| | | | | internalin |
| SEQ ID NO. 32 | LM-3609.1 | From 1106041 | to 1107759 | Unknown, similar to |
| | | | | AUTOLYSIN (EC 3.5.1.28) |
| | | | | (N-ACETYLMURAMOYL-L- |
| | | | | ALANINE AMIDASE) |
| SEQ ID NO. 33 | LM-3691.2 | From 2162323 | to 2164011 | Unknown, putative |
| | | | | peptidoglycan bound protein |
| | | | | (LPXTG motif) |
| SEQ ID NO. 34 | LM-3700.2 | From 2653211 | to 2657803 | Unknown, peptidoglycan |
| | | | | anchored protein (LPXTG |
| | | | | motif) |
| SEQ ID NO. 35 | LM-3752.3 | From 357775 | to 359676 | Unknown, similar to |
| | | | | internalin |
| SEQ ID NO. 36 | LM-757.1 | From 2544267 | to 2545433 | Unknown, similar to |
| | | | | internalin proteins |
| SEQ ID NO. 37 | LM-814.2 | From 2264772 | to 2268230 | Unknown, putative |
| | | | | peptidoglycan bound protein |
| | | | | (LPXTG motif) |
| SEQ ID NO. 38 | LM-816.2 | From 2259753 | to 2264591 | Unknown, putative |
| | | | | peptidoglycan bound protein |
| | | | | (LPXTG motif) |
| SEQ ID NO. 39 | LM-894.1 | From 2469093 | to 2471915 | Unknown, similar to |
| | | | | internalin proteins |
| SEQ ID NO. 40 | LM-966.1 | From 173309 | to 174556 | Unknown, cell wall |
| | | | | anchored protein |
| SEQ ID NO. 41 | LM-973.1 | From 169510 | to 172008 | Unknown, similar to |
| | | | | internalin proteins |
| SEQ ID NO. 42 | LM-133.1 | From 1230773 | to 1232308 | Unknown, similar to cobyric |
| | | | | acid synthase CbiP |
| SEQ ID NO. 43 | LM-134.1 | From 1229967 | to 1230773 | Unknown, similar to cobalt |
| | | | | transport ATP-binding |
| | | | | protein CbiO |
| SEQ ID NO. 44 | LM-135.1 | From 1229277 | to 1229954 | Unknown, similar to cobalt |
| | | | | transport protein Q |
| SEQ ID NO. 45 | LM-136.1 | From 1228994 | to 1229290 | Unknown, similar to putative |
| | | | | cobalt transport protein |
| | | | | CbiN |
| SEQ ID NO. 46 | LM-137.1 | From 1228263 | to 1228997 | Unknown, similar to |
| | | | | cobalamin biosynthesis |
| | | | | protein M |
| SEQ ID NO. 47 | LM-138.1 | From 1227556 | to 1228266 | Unknown, similar to |
| | | | | S-adenosyl-methionine: |
| | | | | precorrin-2 |
| | | | | methyltransferase |
| SEQ ID NO. 48 | LM-139.1 | From 1226778 | to 1227563 | unknown, similar to |
| | | | | anaerobic Cobalt Chelatase |
| | | | | In Cobalamin Biosynthesis |
| SEQ ID NO. 49 | LM-141.1 | From 1225300 | to 1226781 | Unknown, similar |
| | | | | uroporphyrinogen-III |
| | | | | methyltransferase/uroporphyrinogen- |
| | | | | III synthase |
| SEQ ID NO. 50 | LM-142.1 | From 1224548 | to 1225300 | Unknown, similar to |
| | | | | cobalamin biosynthesis J |
| | | | | protein CbiJ |
| SEQ ID NO. 51 | LM-143.1 | From 1223826 | to 1224551 | Unknown, similar to |
| | | | | precorrin methylase |
| SEQ ID NO. 52 | LM-144.1 | From 1222798 | to 1223829 | Unknown, similar to |
| | | | | cobalamin biosynthesis |
| | | | | protein G CbiG |
| SEQ ID NO. 53 | LM-145.1 | From 1222062 | to 1222811 | Unknown, similar to |
| | | | | precorrin-3 methylase |
| SEQ ID NO. 54 | LM-146.1 | From 1221487 | to 1222056 | Unknown, similar to |
| | | | | precorrin decarbocylase |
| SEQ ID NO. 55 | LM-147.1 | From 1220901 | to 1221497 | Unknown, similar to |
| | | | | precorrin methylase |
| SEQ ID NO. 56 | LM-149.1 | From 1219783 | to 1220904 | Unknown, similar to |
| | | | | cobalamin biosynthesis |
| | | | | protein CbiD |
| SEQ ID NO. 57 | LM-150.1 | From 1219135 | to 1219767 | Unknown, similar to |
| | | | | precorrin isomerase |
| SEQ ID NO. 58 | LM-151.1 | From 1218175 | to 1219122 | Unknown, similar to |
| | | | | cobalamine synthesis |
| | | | | protein CbiB |
| SEQ ID NO. 59 | LM-152.1 | From 1216963 | to 1217322 | FALSE ORF |
| SEQ ID NO. 60 | LM-181.1 | From 1196097 | to 1197182 | unknown, similar to |
| | | | | Salmonella typhimurium |
| | | | | CobD protein and to |
| | | | | histidinol-phosphate |
| | | | | aminotransferase |
| SEQ ID NO. 61 | LM-207.1 | From 1180152 | to 1181036 | Regulatory protein similar to |
| | | | | Salmonella typhimurium |
| | | | | PocR protein |
| SEQ ID NO. 62 | LM-209.1 | From 1179168 | to 1179743 | unknown, similar to alpha- |
| | | | | ribazole-5-phosphatase |
| SEQ ID NO. 63 | LM-210.1 | From 1178421 | to 1179167 | Unknown, highly similar to |
| | | | | cobalamin (5-phosphatase) |
| | | | | synthetase |
| SEQ ID NO. 64 | LM-212.1 | From 1177862 | to 1178419 | unknown, similar to |
| | | | | bifunctional cobalamin |
| | | | | biosynthesis protein CopB, |
| | | | | (cobinamide kinase; |
| | | | | cobinamide phosphatase |
| | | | | guanylyltransferase) |
| SEQ ID NO. 65 | LM-1.3 | From 2710869 | to 2712755 | Unknown, similar to NADH |
| | | | | dehydrogenase |
| SEQ ID NO. 66 | LM-10.1 | From 2718312 | to 2719055 | Unknown |
| SEQ ID NO. 67 | LM-100.1 | From 2775644 | to 2776486 | Unknown, similar to |
| | | | | aldo/keto reductase |
| SEQ ID NO. 68 | LM-1003.1 | From 586329 | to 586994 | Unknown |
| SEQ ID NO. 69 | LM-1004.1 | From 585015 | to 585962 | Unknown, similar to B. subtilis DeoR |
| | | | | transcriptional |
| | | | | regulator |
| SEQ ID NO. 70 | LM-1005.1 | From 583507 | to 584757 | Unknown, similar to putative |
| | | | | NAD(P)-dependent |
| | | | | oxidoreductase |
| SEQ ID NO. 71 | LM-1007.1 | From 583072 | to 583452 | Unknown |
| SEQ ID NO. 72 | LM-1008.1 | From 582526 | to 583047 | Unknown, similar to PTS |
| | | | | system, glucitol/sorbitol- |
| | | | | specific enzyme II CII |
| | | | | component |
| SEQ ID NO. 73 | LM-1009.1 | From 581519 | to 582505 | Unknown, similar to PTS |
| | | | | system, glucitol/sorbitol- |
| | | | | specific enzyme IIBC |
| | | | | component |
| SEQ ID NO. 74 | LM-101.1 | From 2776532 | to 2776777 | Unknown, similar to B. subtilis |
| | | | | YaaL protein |
| SEQ ID NO. 75 | LM-1010.1 | From 581150 | to 581500 | Unknown, similar to PTS |
| | | | | system, glucitol/sorbitol- |
| | | | | specific enzyme IIA |
| | | | | component |
| SEQ ID NO. 76 | LM-1011.1 | From 580119 | to 581039 | Unknown, similar to ABC |
| | | | | transporter (binding protein) |
| SEQ ID NO. 77 | LM-1012.1 | From 578886 | to 580079 | Unknown, similar to |
| | | | | penicillin-binding protein |
| SEQ ID NO. 78 | LM-1013.1 | From 577632 | to 578648 | Unknown, similar to |
| | | | | tagatose-1,6-diphosphate |
| | | | | aldolase |
| SEQ ID NO. 79 | LM-1015.1 | From 576403 | to 577584 | Unknown, similar to N-acyl- |
| | | | | L-amino acid |
| | | | | amidohydrolase |
| SEQ ID NO. 80 | LM-1017.1 | From 575166 | to 576437 | Unknown, similar to N- |
| | | | | carbamyl-L-amino acid |
| | | | | amidohydrolase |
| SEQ ID NO. 81 | LM-1018.1 | From 573740 | to 575062 | Unknown, similar to 6- |
| | | | | phospho-beta-glucosidase |
| SEQ ID NO. 82 | LM-102.1 | From 2776792 | to 2777388 | Unknown, highly similar to |
| | | | | recombination protein recR |
| SEQ ID NO. 83 | LM-1020.1 | From 572600 | to 573568 | Unknown, similar to |
| | | | | transcription regulator (Lacl |
| | | | | family) |
| SEQ ID NO. 84 | LM-1022.1 | From 571204 | to 572559 | Unknown, similar to |
| | | | | unknown proteins |
| SEQ ID NO. 85 | LM-1023.1 | From 570916 | to 571185 | Unknown, similar to |
| | | | | unknown proteins |
| SEQ ID NO. 86 | LM-1024.1 | From 570008 | to 570838 | Unknown |
| SEQ ID NO. 87 | LM-1025.1 | From 569094 | to 569948 | Unknown |
| SEQ ID NO. 88 | LM-1029.1 | From 567030 | to 569081 | Unknown |
| SEQ ID NO. 89 | LM-103.1 | From 2777497 | to 2777814 | Unknown, highly similar to |
| | | | | B. subtilis YaaK protein |
| SEQ ID NO. 90 | LM-1031.1 | From 565764 | to 567014 | Unknown, conserved |
| | | | | hypothetical protein similar |
| | | | | to putative |
| | | | | glucosaminyltransferase |
| SEQ ID NO. 91 | LM-1032.1 | From 564257 | to 565753 | Unknown, hypothetical |
| | | | | secreted protein |
| SEQ ID NO. 92 | LM-1033.1 | From 562789 | to 564264 | Unknown, transmembrane |
| | | | | protein |
| SEQ ID NO. 93 | LM-1036.1 | From 561819 | to 562559 | Unknown, similar to |
| | | | | transcription regulator (TipA |
| | | | | from Streptomyces |
| | | | | coelicolor) |
| SEQ ID NO. 94 | LM-1037.1 | From 560443 | to 561774 | Unknown |
| SEQ ID NO. 95 | LM-1040.2 | From 2915744 | to 2916097 | Unknown |
| SEQ ID NO. 96 | LM-1041.2 | From 2915219 | to 2915641 | Unknown similar to |
| | | | | transcriptional regulator |
| | | | | (MarR family) |
| SEQ ID NO. 97 | LM-1043.1 | From 2914057 | to 2915205 | Unknown, similar to efflux |
| | | | | proteins |
| SEQ ID NO. 98 | LM-1045.1 | From 2912595 | to 2913686 | Unknown, highly similar to |
| | | | | phosphoserine |
| | | | | aminotransferase |
| SEQ ID NO. 99 | LM-1047.1 | From 2911415 | to 2912602 | Unknown, similar to D-3- |
| | | | | phosphoglycerate |
| | | | | dehydrogenase |
| SEQ ID NO. 100 | LM-1048.1 | From 2910085 | to 2911326 | Unknown, similar to an |
| | | | | hypothetical protein from |
| | | | | Thermotoga maritima |
| SEQ ID NO. 101 | LM-1049.1 | From 2909753 | to 2910076 | Unknown |
| SEQ ID NO. 102 | LM-1052.1 | From 2904598 | to 2906940 | Unknown, amino-terminal |
| | | | | domain similar to |
| | | | | transcription regulators |
| SEQ ID NO. 103 | LM-1054.1 | From 2903200 | to 2904402 | Unknown, similar to |
| | | | | carboxypeptidase |
| SEQ ID NO. 104 | LM-1055.1 | From 2901800 | to 2903200 | Unknown, similar to |
| | | | | transmembrane efflux |
| | | | | protein |
| SEQ ID NO. 105 | LM-1056.1 | From 2900594 | to 2901784 | Unknown, similar to |
| | | | | peptidases |
| SEQ ID NO. 106 | LM-1057.1 | From 2899313 | to 2900506 | Unknown, similar to |
| | | | | transport protein |
| SEQ ID NO. 107 | LM-1058.1 | From 2898535 | to 2899266 | Unknown, similar to |
| | | | | reductases |
| SEQ ID NO. 108 | LM-1059.1 | From 2897847 | to 2898374 | Unknown, similar to |
| | | | | transcriptional regulator |
| SEQ ID NO. 109 | LM-1060.1 | From 2897116 | to 2897823 | Unknown |
| SEQ ID NO. 110 | LM-1061.1 | From 2896241 | to 2897059 | Unknown, similar to D- |
| | | | | alanyl-D-alanine |
| | | | | carboxypeptidase |
| SEQ ID NO. 111 | LM-1064.1 | From 2894510 | to 2895883 | Unknown, similar to |
| | | | | GTPase |
| SEQ ID NO. 112 | LM-1066.1 | From 2892596 | to 2894485 | Unknown, highly similar to |
| | | | | GidA protein |
| SEQ ID NO. 113 | LM-1067.2 | From 2892057 | to 2892437 | Unknown, hypothetical |
| | | | | secreted protein |
| SEQ ID NO. 114 | LM-1069.3 | From 434945 | to 435817 | Unknown |
| SEQ ID NO. 115 | LM-107.1 | From 2777844 | to 2779583 | Unknown, highly similar to |
| | | | | DNA polymerase III |
| | | | | (gamma and tau subunits) |
| SEQ ID NO. 116 | LM-1070.1 | From 433153 | to 434745 | Unknown, similar to |
| | | | | phosphoenolpyruvate |
| | | | | synthase (N-terminal part) |
| SEQ ID NO. 117 | LM-1074.1 | From 429630 | to 432095 | Internalin |
| SEQ ID NO. 118 | LM-1075.1 | From 428981 | to 429403 | Unknown |
| SEQ ID NO. 119 | LM-1076.1 | From 428576 | to 428968 | Unknown |
| SEQ ID NO. 120 | LM-1077.1 | From 428127 | to 428507 | Unknown, similar to B. subtilis |
| | | | | YyaH protein |
| SEQ ID NO. 121 | LM-1079.1 | From 427104 | to 428111 | Unknown, similar to |
| | | | | phosphate transport protein |
| SEQ ID NO. 122 | LM-108.1 | From 2779910 | to 2780374 | Unknown |
| SEQ ID NO. 123 | LM-1080.1 | From 426597 | to 426995 | Unknown |
| SEQ ID NO. 124 | LM-1081.1 | From 426190 | to 426606 | Unknown |
| SEQ ID NO. 125 | LM-1082.1 | From 424130 | to 426064 | Unknown, similar to |
| | | | | transcriptional |
| | | | | antiterminator (BglG family) |
| SEQ ID NO. 126 | LM-1083.1 | From 421469 | to 424096 | Unknown, highly similar to |
| | | | | E. col YbgG protein, a |
| | | | | putative sugar hydrolase |
| SEQ ID NO. 127 | LM-1084.1 | From 420335 | to 421447 | Unknown, similar to |
| | | | | fructose-specific |
| | | | | phosphotransferase |
| | | | | enzyme IIC |
| SEQ ID NO. 128 | LM-1085.1 | From 419999 | to 420331 | Unknown, similar to |
| | | | | fructose-specific |
| | | | | phosphotransferase |
| | | | | enzyme IIB |
| SEQ ID NO. 129 | LM-1088.1 | From 419544 | to 420002 | Unknown, similar to |
| | | | | phosphotransferase system |
| | | | | enzyme IIA |
| SEQ ID NO. 130 | LM-1089.1 | From 418891 | to 419373 | Unknown, similar to |
| | | | | unknown proteins |
| SEQ ID NO. 131 | LM-109.1 | From 2780933 | to 2782297 | Unknown, similar to PTS |
| | | | | system, cellobiose-specific |
| | | | | enzyme IIC |
| SEQ ID NO. 132 | LM-1091.1 | From 417963 | to 418763 | Unknown, similar to 1- |
| | | | | pyrroline-5-carboxylate |
| | | | | reductase (ProC) |
| SEQ ID NO. 133 | LM-1092.1 | From 417535 | to 417960 | Unknown, weakly similar to |
| | | | | blasticidin S- |
| | | | | acetyltransferase |
| SEQ ID NO. 134 | LM-1093.1 | From 416796 | to 417479 | Unknown, similar to L. monocytogenes |
| | | | | extracellular P60 protein |
| SEQ ID NO. 135 | LM-1094.1 | From 416203 | to 416652 | Unknown |
| SEQ ID NO. 136 | LM-1097.1 | From 415224 | to 416168 | Unknown, highly similar to |
| | | | | B. subtilis YqfA protein |
| SEQ ID NO. 137 | LM-1098.1 | From 414928 | to 415227 | Unknown |
| SEQ ID NO. 138 | LM-1099.1 | From 414095 | to 414760 | Unknown, similar to uracil- |
| | | | | DNA glycosylase |
| SEQ ID NO. 139 | LM-11.1 | From 2719056 | to 2719775 | Unknown |
| SEQ ID NO. 140 | LM-1100.1 | From 412849 | to 413964 | Unknown, low temperature |
| | | | | requirement protein A |
| SEQ ID NO. 141 | LM-1101.1 | From 412457 | to 412825 | Unknown |
| SEQ ID NO. 142 | LM-1102.1 | From 411992 | to 412363 | Unknown, similar to B. subtilis |
| | | | | YhdG protein |
| SEQ ID NO. 143 | LM-1105.1 | From 409944 | to 411860 | Unknown, similar to B. subtilis |
| | | | | IolD protein, to |
| | | | | acetolactate synthase |
| SEQ ID NO. 144 | LM-1107.1 | From 408954 | to 409931 | Unknown, similar to B. subtilis |
| | | | | IolC protein and to |
| | | | | fructokinase |
| SEQ ID NO. 145 | LM-1108.1 | From 408116 | to 408937 | Unknown, similar to B. subtilis |
| | | | | IolB protein |
| SEQ ID NO. 146 | LM-1110.2 | From 406637 | to 408103 | Unknown, highly similar to |
| | | | | B. subtilis methylmalonate- |
| | | | | semialdehyde |
| | | | | dehydrogenase IolA |
| SEQ ID NO. 147 | LM-1112.2 | From 405680 | to 406441 | Unknown, similar to B. subtilis |
| | | | | transcription |
| | | | | repressor of myo-inositol |
| | | | | catabolism operon IolR |
| SEQ ID NO. 148 | LM-1114.1 | From 405221 | to 405607 | Unknown |
| SEQ ID NO. 149 | LM-1115.3 | From 404365 | to 404994 | Unknown |
| SEQ ID NO. 150 | LM-1116.4 | From 807976 | to 810792 | Unknown, similar to |
| | | | | transcriptional regulator |
| | | | | (NifA/NtrC family) |
| SEQ ID NO. 151 | LM-1117.1 | From 807255 | to 807689 | Unknown, similar to |
| | | | | mannose-specific |
| | | | | phosphotransferase system |
| | | | | (PTS) component IIA |
| SEQ ID NO. 152 | LM-1118.1 | From 806770 | to 807255 | Unknown, similar to |
| | | | | mannose-specific |
| | | | | phosphotransferase system |
| | | | | (PTS) component IIB |
| SEQ ID NO. 153 | LM-112.1 | From 2783466 | to 2784107 | Unknown |
| SEQ ID NO. 154 | LM-1121.1 | From 805784 | to 806596 | Unknown, similar to |
| | | | | mannose-specific |
| | | | | phosphotransferase system |
| | | | | (PTS) component IIC |
| SEQ ID NO. 155 | LM-1122.1 | From 804887 | to 805765 | Unknown, similar to |
| | | | | mannose-specific |
| | | | | phosphotransferase system |
| | | | | (PTS) component IID |
| SEQ ID NO. 156 | LM-1123.1 | From 804382 | to 804729 | Unknown |
| SEQ ID NO. 157 | LM-1125.1 | From 803745 | to 804212 | Unknown |
| SEQ ID NO. 158 | LM-1126.1 | From 803201 | to 803548 | Unknown |
| SEQ ID NO. 159 | LM-1127.1 | From 802356 | to 802739 | Unknown |
| SEQ ID NO. 160 | LM-1128.1 | From 801336 | to 802202 | Unknown, similar to |
| | | | | transcription regulator |
| | | | | (repressor) |
| SEQ ID NO. 161 | LM-1129.1 | From 800965 | to 801297 | Unknown |
| SEQ ID NO. 162 | LM-113.1 | From 2784354 | to 2784674 | Unknown, similar to |
| | | | | hypothetical proteins |
| SEQ ID NO. 163 | LM-1130.1 | From 799996 | to 800925 | Unknown, conserved |
| | | | | hypothetical protein |
| SEQ ID NO. 164 | LM-1131.1 | From 798828 | to 799817 | Unknown, similar to alcohol |
| | | | | dehydrogenase |
| SEQ ID NO. 165 | LM-1132.1 | From 798141 | to 798788 | Unknown, similar to |
| | | | | transcription regulator |
| SEQ ID NO. 166 | LM-1133.1 | From 797353 | to 798105 | Unknown |
| SEQ ID NO. 167 | LM-1134.1 | From 796075 | to 797193 | Unknown, similar to |
| | | | | transcriptional regulator |
| | | | | (LacI family) |
| SEQ ID NO. 168 | LM-1135.1 | From 795034 | to 796062 | Unknown, similar to alpha- |
| | | | | 1,6-mannanase |
| SEQ ID NO. 169 | LM-1136.1 | From 793777 | to 795030 | Unknown, similar to sugar |
| | | | | ABC transporter, |
| | | | | periplasmic sugar-binding |
| | | | | protein |
| SEQ ID NO. 170 | LM-1137.1 | From 792879 | to 793754 | Unknown, similar to ABC |
| | | | | transporter, permease |
| | | | | protein |
| SEQ ID NO. 171 | LM-1138.1 | From 791977 | to 792867 | Unknown, similar to putative |
| | | | | sugar ABC transporter, |
| | | | | permease protein |
| SEQ ID NO. 172 | LM-1139.1 | From 790662 | to 791960 | Unknown |
| SEQ ID NO. 173 | LM-114.1 | From 2784805 | to 2786319 | Unknown, highly similar to |
| | | | | gluconate kinase |
| SEQ ID NO. 174 | LM-1140.1 | From 789520 | to 790509 | Unknown, similar to lipoate- |
| | | | | protein ligase |
| SEQ ID NO. 175 | LM-1141.1 | From 788642 | to 789514 | Unknown, similar to |
| | | | | unknown proteins |
| SEQ ID NO. 176 | LM-1142.1 | From 787320 | to 788576 | Unknown, similar to |
| | | | | ATP/GTP-binding protein |
| SEQ ID NO. 177 | LM-1143.1 | From 786372 | to 786992 | Unknown, similar to |
| | | | | unknown proteins |
| SEQ ID NO. 178 | LM-1144.1 | From 785754 | to 786362 | Unknown |
| SEQ ID NO. 179 | LM-1146.1 | From 784788 | to 785747 | Unknown |
| SEQ ID NO. 180 | LM-1147.1 | From 783901 | to 784788 | Unknown |
| SEQ ID NO. 181 | LM-1149.1 | From 782794 | to 783774 | Unknown, similar to |
| | | | | hypothetical proteins |
| SEQ ID NO. 182 | LM-1151.1 | From 781896 | to 782801 | Unknown; Similar to ABC |
| | | | | transporter (ATP-binding |
| | | | | protein) |
| SEQ ID NO. 183 | LM-1152.1 | From 781103 | to 781924 | Unknown, similar to |
| | | | | unknown proteins |
| SEQ ID NO. 184 | LM-1153.2 | From 780377 | to 780988 | Unknown, weakly similar to |
| | | | | a bile acid 7-alpha |
| | | | | dehydratase |
| SEQ ID NO. 185 | LM-1154.1 | From 779616 | to 780296 | Unknown, similar to |
| | | | | transcription regulator |
| | | | | Crp/Fnr family |
| SEQ ID NO. 186 | LM-1155.1 | From 778654 | to 779490 | Unknown, weakly similar to |
| | | | | a putative haloacetate |
| | | | | dehalogenase |
| SEQ ID NO. 187 | LM-1156.1 | From 778262 | to 778558 | Unknown |
| SEQ ID NO. 188 | LM-1157.1 | From 777692 | to 778207 | Unknown |
| SEQ ID NO. 189 | LM-1158.1 | From 777209 | to 777496 | Unknown |
| SEQ JD NO. 190 | LM-1159.1 | From 776761 | to 777102 | Unknown |
| SEQ ID NO. 191 | LM-1160.1 | From 776398 | to 776697 | Unknown, hypothetical |
| SEQ ID NO. 192 | LM-1161.1 | From 775744 | to 776247 | Unknown |
| SEQ ID NO. 193 | LM-1164.1 | From 773715 | to 775715 | Unknown, similar to ABC |
| | | | | transporter, ATP-binding |
| | | | | protein |
| SEQ ID NO. 194 | LM-1165.1 | From 772996 | to 773700 | Unknown |
| SEQ ID NO. 195 | LM-1166.1 | From 772310 | to 772999 | Unknown, similar to ABC |
| | | | | transporter, ATP-binding |
| | | | | protein |
| SEQ ID NO. 196 | LM-1167.1 | From 771949 | to 772326 | Unknown, similar to |
| | | | | transcriptional regulator |
| | | | | (GntR family) |
| SEQ ID NO. 197 | LM-1168.1 | From 771026 | to 771685 | Unknown, similar to putative |
| | | | | transcription regulator |
| SEQ ID NO. 198 | LM-1169.1 | From 769639 | to 771012 | Unknown, similar to 6- |
| | | | | phospho-beta-glucosidase |
| SEQ ID NO. 199 | LM-117.1 | From 2786435 | to 2787373 | Unknown, secreted protein |
| | | | | with 1 GW repeat |
| SEQ ID NO. 200 | LM-1171.1 | From 767766 | to 769619 | Unknown, similar to |
| | | | | phosphotransferase system |
| | | | | (PTS) beta-glucoside- |
| | | | | specific enzyme IIABC |
| | | | | component |
| SEQ ID NO. 201 | LM-1172.1 | From 766810 | to 767742 | Unknown |
| SEQ ID NO. 202 | LM-1173.1 | From 766351 | to 766797 | Unknown, similar to ribose |
| | | | | 5-phosphate isomerase |
| SEQ ID NO. 203 | LM-1174.1 | From 765683 | to 766354 | Unknown, similar to |
| | | | | Ribulose-5-Phosphate 3- |
| | | | | Epimerase |
| SEQ ID NO. 204 | LM-1175.1 | From 764465 | to 765469 | Unknown, similar to |
| | | | | transcriptional regulator |
| | | | | (LacI family) |
| SEQ ID NO. 205 | LM-1176.1 | From 763798 | to 764307 | Unknown, similar to |
| | | | | transcription regulator |
| SEQ ID NO. 206 | LM-1181.1 | From 760455 | to 760859 | Unknown |
| SEQ ID NO. 207 | LM-1182.2 | From 759972 | to 760310 | Unknown |
| SEQ ID NO. 208 | LM-1183.2 | From 759479 | to 759958 | Unknown |
| SEQ ID NO. 209 | LM-1184.3 | From 2916291 | to 2916890 | Unknown, similar to yeast |
| | | | | protein Frm2p involved in |
| | | | | fatty acid signaling |
| SEQ ID NO. 210 | LM-1186.1 | From 2916946 | to 2917266 | Unknown, similar to |
| | | | | thioredoxin |
| SEQ ID NO. 211 | LM-1189.1 | From 2917389 | to 2918051 | Unknown, similar to |
| | | | | phosphoglucomutase |
| SEQ ID NO. 212 | LM-119.2 | From 1239842 | to 1240201 | Unknown |
| SEQ ID NO. 213 | LM-1190.1 | From 2918048 | to 2919169 | Unknown; similar to |
| | | | | unknown proteins |
| SEQ ID NO. 214 | LM-1195.1 | From 2919166 | to 2921343 | Unknown, similar to a |
| | | | | maltose phosphorylase |
| SEQ ID NO. 215 | LM-1196.1 | From 2921340 | to 2922371 | Unknown, similar to |
| | | | | oxidoreductases |
| SEQ ID NO. 216 | LM-1198.1 | From 2922429 | to 2923223 | Unknown, highly similar to |
| | | | | an E. coli protein |
| SEQ ID NO. 217 | LM-1199.1 | From 2923236 | to 2924288 | Unknown, similar to alcohol |
| | | | | dehydrogenase |
| SEQ ID NO. 218 | LM-1201.1 | From 2924307 | to 2925158 | Unknown, similar to sugar |
| | | | | ABC transporter permease |
| | | | | protein |
| SEQ ID NO. 219 | LM-1202.1 | From 2925145 | to 2926026 | Unknown, similar to sugar |
| | | | | ABC transporter permease |
| | | | | protein |
| SEQ ID NO. 220 | LM-1203.1 | From 2926101 | to 2927393 | Unknown, similar to sugar |
| | | | | binding protein (ABC |
| | | | | transporter) |
| SEQ ID NO. 221 | LM-1205.1 | From 2927390 | to 2928631 | Unknown, similar to |
| | | | | Sucrose phosphorylase |
| SEQ ID NO. 222 | LM-1206.1 | From 2928668 | to 2929090 | Unknown, weakly similar to |
| | | | | sucrose phosphorylase |
| SEQ ID NO. 223 | LM-1208.1 | From 2929315 | to 2930340 | Unknown, similar to |
| | | | | transcriptional regulator |
| SEQ ID NO. 224 | LM-1209.1 | From 2930479 | to 2932473 | Unknown |
| SEQ ID NO. 225 | LM-121.1 | From 1239039 | to 1239797 | Unknown, similar to rRNA |
| | | | | methylase |
| SEQ ID NO. 226 | LM-1210.1 | From 2932609 | to 2933148 | Unknown, similar to |
| | | | | unknown proteins |
| SEQ ID NO. 227 | LM-1212.1 | From 2933303 | to 2934715 | Unknown, similar to |
| | | | | transmembrane efflux |
| | | | | proteins |
| SEQ ID NO. 228 | LM-1213.1 | From 2934756 | to 2935070 | Unknown, highly similar to |
| | | | | B. subtilis YuID protein |
| SEQ ID NO. 229 | LM-1214.1 | From 2935083 | to 2935904 | Unknown, highly similar to |
| | | | | rhamnulose-1-phosphate |
| | | | | aldolase |
| SEQ ID NO. 230 | LM-1216.1 | From 2935917 | to 2937179 | Unknown, highly similar to |
| | | | | L-rhamnose isomerase |
| SEQ ID NO. 231 | LM-1218.1 | From 2937192 | to 2938643 | Unknown; similar to |
| | | | | rhamnulokinase |
| SEQ ID NO. 232 | LM-122.1 | From 1237934 | to 1239013 | Unknown, similar to endo- |
| | | | | 1,4-beta-glucanase and to |
| | | | | aminopeptidase |
| SEQ ID NO. 233 | LM-1220.1 | From 2938662 | to 2939930 | Unknown, similar to sugar |
| | | | | transport proteins |
| SEQ ID NO. 234 | LM-1221.1 | From 2940053 | to 2941033 | Unknown, similar to AraC- |
| | | | | type regulatory protein |
| SEQ ID NO. 235 | LM-1222.1 | From 2941083 | to 2941544 | Unknown |
| SEQ ID NO. 236 | LM-1223.2 | From 2941599 | to 2942219 | Unknown, highly similar to |
| | | | | B. subtilis Jag protein |
| SEQ ID NO. 237 | LM-1224.3 | From 2942216 | to 2943079 | Unknown, highly similar to |
| | | | | B. subtilis SpoIIIJ protein |
| SEQ ID NO. 238 | LM-1225.2 | From 884170 | to 885270 | Unknown, similar to |
| | | | | excinuclease ABC, chain C |
| | | | | (UvrC) |
| SEQ ID NO. 239 | LM-1228.1 | From 882962 | to 884065 | Unknown, similar to B. subtilis |
| | | | | YxjH and YxjG |
| | | | | proteins |
| SEQ ID NO. 240 | LM-123.1 | From 1236836 | to 1237822 | Unknown, similar to N- |
| | | | | acetylmuramoyl-L-alanine |
| | | | | amidase (autolysin) |
| SEQ ID NO. 241 | LM-1230.1 | From 882328 | to 882705 | Unknown, conserved |
| | | | | hypothetical protein |
| SEQ ID NO. 242 | LM-1231.1 | From 881992 | to 882249 | Unknown, similar to B. subtilis |
| | | | | protein YsdA |
| SEQ ID NO. 243 | LM-1239.1 | From 872616 | to 875258 | unknown, similar to cation |
| | | | | (clacium) transporting |
| | | | | ATPase |
| SEQ ID NO. 244 | LM-1241.1 | From 871940 | to 872410 | Unknown |
| SEQ ID NO. 245 | LM-1242.1 | From 870587 | to 871807 | Unknown, similar to |
| | | | | Tetracycline resistance |
| | | | | protein |
| SEQ ID NO. 246 | LM-1243.1 | From 869095 | to 870480 | unknown, highly similar to |
| | | | | hexose phosphate transport |
| | | | | protein |
| SEQ ID NO. 247 | LM-1245.1 | From 867163 | to 868800 | Unknown, ABC transporter |
| | | | | (ATP binding protein) |
| SEQ ID NO. 248 | LM-1246.1 | From 866577 | to 866990 | Unknown, similar to B. subtilis |
| | | | | YrkR protein |
| SEQ ID NO. 249 | LM-1249.1 | From 864791 | to 865537 | Unknown |
| SEQ ID NO. 250 | LM-125.1 | From 1235670 | to 1236539 | Unknown, similar to N- |
| | | | | acetylmuramoyl-L-alanine |
| | | | | amidase (autolysin) |
| SEQ ID NO. 251 | LM-1250.1 | From 863798 | to 864688 | Unknown; similar to |
| | | | | transcriptional regulator |
| SEQ ID NO. 252 | LM-1251.1 | From 863322 | to 863606 | Unknown, similar to |
| | | | | transposase |
| SEQ ID NO. 253 | LM-1254.1 | From 861731 | to 862642 | Unknown |
| SEQ ID NO. 254 | LM-1255.1 | From 859656 | to 861617 | unknown, highly similar to |
| | | | | fructose-1,6- |
| | | | | bisphosphatase |
| SEQ ID NO. 255 | LM-1257.1 | From 855759 | to 859406 | unknown, highly similar to |
| | | | | pyruvate-flavodoxin |
| | | | | oxidoreductase |
| SEQ ID NO. 256 | LM-1258.1 | From 854745 | to 855581 | Unknown, similar to |
| | | | | transposases |
| SEQ ID NO. 257 | LM-1259.1 | From 854443 | to 854748 | Unknown, similar to |
| | | | | transposases |
| SEQ ID NO. 258 | LM-1261.1 | From 852704 | to 854338 | Unknown, similar to |
| | | | | transport protein |
| SEQ ID NO. 259 | LM-1262.1 | From 851225 | to 852505 | Unknown, similar to 3- |
| | | | | hydroxy-3-methylglutaryl- |
| | | | | coenzyme a reductase |
| SEQ ID NO. 260 | LM-1263.1 | From 850216 | to 851184 | Unknown |
| SEQ ID NO. 261 | LM-1265.1 | From 849314 | to 850138 | Unknown, similar to |
| | | | | oxydoreductases |
| SEQ ID NO. 262 | LM-1266.1 | From 848804 | to 849193 | Unknown, similar to |
| | | | | transcriptional regulators |
| SEQ ID NO. 263 | LM-1267.1 | From 848126 | to 848788 | Unknown |
| SEQ ID NO. 264 | LM-1268.1 | From 847552 | to 848109 | unknown, some similarity to |
| | | | | acetyltransferases |
| SEQ ID NO. 265 | LM-1269.1 | From 846594 | to 847442 | Unknown |
| SEQ ID NO. 266 | LM-1271.2 | From 843949 | to 846579 | unknown, similar to cation |
| | | | | transporting ATPase |
| SEQ ID NO. 267 | LM-1273.1 | From 939106 | to 939819 | Unknown, similar to |
| | | | | transcription regulator |
| | | | | (GntR family) |
| SEQ ID NO. 268 | LM-1275.2 | From 937739 | to 939025 | Unknown, similar to PTS |
| | | | | system, cellobiose-specific |
| | | | | IIC component |
| SEQ ID NO. 269 | LM-1277.2 | From 937202 | to 937594 | Unknown |
| SEQ ID NO. 270 | LM-1278.1 | From 936136 | to 936603 | Unknown, similar to B. subtilis |
| | | | | YdcK protein |
| SEQ ID NO. 271 | LM-128.1 | From 1233904 | to 1234434 | Unknown, similar to |
| | | | | unknown proteins |
| SEQ ID NO. 272 | LM-1283.1 | From 933959 | to 936136 | Unknown, conserved |
| | | | | hypothetical protein |
| SEQ ID NO. 273 | LM-1285.1 | From 932257 | to 933882 | Unknown, similar to |
| | | | | transport proteins |
| SEQ ID NO. 274 | LM-1286.1 | From 931451 | to 932050 | Indirect negative regulation |
| | | | | of sigma B dependant gene |
| | | | | expression (serine |
| | | | | phosphatase) |
| SEQ ID NO. 275 | LM-1287.1 | From 930671 | to 931450 | RNA polymerase sigma-37 |
| | | | | factor (sigma-B) |
| SEQ ID NO. 276 | LM-1288.1 | From 930220 | to 930693 | sigma-B activity negative |
| | | | | regulator RsbW |
| SEQ ID NO. 277 | LM-1289.1 | From 929892 | to 930236 | anti-anti-sigma factor |
| | | | | (antagonist of RsbW) |
| SEQ ID NO. 278 | LM-129.1 | From 1233366 | to 1233815 | Unknown, similar to |
| | | | | unknown proteins |
| SEQ ID NO. 279 | LM-1290.1 | From 928738 | to 929742 | Unknown, highly similar to |
| | | | | serine phosphatase RsbU |
| SEQ ID NO. 280 | LM-1291.1 | From 928311 | to 928721 | Unknown, highly similar to |
| | | | | positive regulation of sigma- |
| | | | | B activity |
| SEQ ID NO. 281 | LM-1293.1 | From 927952 | to 928308 | Unknown, highly similar to |
| | | | | negative regulation of |
| | | | | sigma-B activity |
| SEQ ID NO. 282 | LM-1294.1 | From 927110 | to 927946 | Unknown, highly similar to |
| | | | | positive regulator of sigma- |
| | | | | B activity |
| SEQ ID NO. 283 | LM-1295.1 | From 926511 | to 926858 | Unknown, similar to B. subtilis |
| | | | | YdcE protein |
| SEQ ID NO. 284 | LM-1296.1 | From 926229 | to 926507 | Unknown, similar to B. subtilis |
| | | | | YdcD protein |
| SEQ ID NO. 285 | LM-1297.1 | From 924917 | to 926023 | Unknown, similar to alanine |
| | | | | racemase |
| SEQ ID NO. 286 | LM-1298.1 | From 924542 | to 924898 | Unknown, similar to holo- |
| | | | | acyl-carrier protein synthase |
| SEQ ID NO. 287 | LM-13.1 | From 2719735 | to 2720484 | Unknown, similar to |
| | | | | creatinine amidohydrolase |
| SEQ ID NO. 288 | LM-130.1 | From 1232884 | to 1233351 | Unknown, similar to |
| | | | | unknown proteins |
| SEQ ID NO. 289 | LM-1300.1 | From 923161 | to 924540 | Unknown, similar to |
| | | | | protoporphyrinogen IX and |
| | | | | coproporphyrinogen III |
| | | | | oxidase (HemY) |
| SEQ ID NO. 290 | LM-1302.1 | From 921537 | to 923012 | Unknown, similar to B. subtilis |
| | | | | YbtB protein |
| SEQ ID NO. 291 | LM-1303.1 | From 921062 | to 921544 | Unknown, similar to B. subtilis |
| | | | | YdbS protein |
| SEQ ID NO. 292 | LM-1304.1 | From 920452 | to 920928 | unknown |
| SEQ ID NO. 293 | LM-1306.1 | From 918135 | to 918902 | unknown |
| SEQ ID NO. 294 | LM-1307.1 | From 917164 | to 918117 | Unknown, similar to |
| | | | | oxidoreductases |
| SEQ ID NO. 295 | LM-1309.1 | From 916436 | to 917164 | Unknown, similar to B. subtilis |
| | | | | NagB protein |
| | | | | (glucosamine-6-phosphate |
| | | | | isomerase) |
| SEQ ID NO. 296 | LM-131.1 | From 1232272 | to 1232838 | Unknown, similar to |
| | | | | unknown protein |
| SEQ ID NO. 297 | LM-1312.1 | From 915090 | to 916415 | Unknown, similar to PTS |
| | | | | system, Lichenan-specific |
| | | | | enzyme IIC component |
| SEQ ID NO. 298 | LM-1313.1 | From 914735 | to 915070 | Unknown, similar to PTS |
| | | | | system, beta-glucoside |
| | | | | enzyme IIB component |
| SEQ ID NO. 299 | LM-1314.1 | From 914405 | to 914734 | Unknown, similar to PTS |
| | | | | system enzyme IIA |
| | | | | component |
| SEQ ID NO. 300 | LM-1316.1 | From 912372 | to 914390 | Unknown; Similar to |
| | | | | transcriptional regulator |
| | | | | (antiterminator) |
| SEQ ID NO. 301 | LM-1317.1 | From 910998 | to 912164 | Unknown; similar to |
| | | | | antibiotic resistance protein |
| SEQ ID NO. 302 | LM-1318.1 | From 910517 | to 910870 | Unknown, similar to B. subtilis |
| | | | | YtcD protein |
| SEQ ID NO. 303 | LM-1319.1 | From 910173 | to 910484 | unknown |
| SEQ ID NO. 304 | LM-1320.1 | From 909159 | to 910157 | unknown |
| SEQ ID NO. 305 | LM-1321.1 | From 908499 | to 909056 | unknown |
| SEQ ID NO. 306 | LM-1322.1 | From 907979 | to 908467 | unknown |
| SEQ ID NO. 307 | LM-1325.1 | From 905962 | to 907524 | Unknown, similar to ATP- |
| | | | | dependent RNA helicase |
| SEQ ID NO. 308 | LM-1326.1 | From 903837 | to 905510 | Unknown, similar to |
| | | | | phosphomannomutase |
| SEQ ID NO. 309 | LM-1327.1 | From 902773 | to 903840 | unknown |
| SEQ ID NO. 310 | LM-1328.1 | From 901837 | to 902751 | unknown |
| SEQ ID NO. 311 | LM-1329.1 | From 900303 | to 901835 | Unknown, similar to oligo- |
| | | | | 1,6-glucosidase |
| SEQ ID NO. 312 | LM-1331.1 | From 899454 | to 900287 | Unknown, similar to sugar |
| | | | | ABC transporter, permease |
| | | | | protein- |
| SEQ ID NO. 313 | LM-1332.1 | From 898589 | to 899467 | Unknown, similar to sugar |
| | | | | ABC transporter, permease |
| | | | | protein |
| SEQ ID NO. 314 | LM-1333.3 | From 897273 | to 898592 | Unknown, similar to putative |
| | | | | sugar ABC transporter, |
| | | | | periplasmic sugar-binding |
| | | | | protein, |
| SEQ ID NO. 315 | LM-1335.3 | From 1104048 | to 1104851 | Unknown, highly similar to |
| | | | | teichoic acid translocation |
| | | | | permease protein TagG |
| SEQ ID NO. 316 | LM-1337.2 | From 1102858 | to 1103757 | Unknown, similar to metal |
| | | | | binding protein |
| SEQ ID NO. 317 | LM-1338.1 | From 1099266 | to 1102706 | Unknown, highly similar to |
| | | | | pyruvate carboxylase |
| SEQ ID NO. 318 | LM-1339.1 | From 1097786 | to 1098988 | Unknown, similar to cell- |
| | | | | division protein RodA and |
| | | | | FtsW |
| SEQ ID NO. 319 | LM-1341.1 | From 1097322 | to 1097603 | Unknown, similar to B. subtilis |
| | | | | YlaN protein |
| SEQ ID NO. 320 | LM-1342.1 | From 1096874 | to 1097116 | Unknown, similar to B. subtilis |
| | | | | YlaI protein |
| SEQ ID NO. 321 | LM-1343.2 | From 1095975 | to 1096835 | unknown |
| SEQ ID NO. 322 | LM-1349.1 | From 1093965 | to 1095803 | Unknown, similar to GTP- |
| | | | | binding ptotein TypA/BipA |
| | | | | (tyrosine phosphorylated |
| | | | | protein A) from E. coli and |
| | | | | B. subtilis (YlaG) |
| SEQ ID NO. 323 | LM-1351.1 | From 1093000 | to 1093773 | Unknown, similar to |
| | | | | extragenic suppressor |
| | | | | protein SuhB and to myoinositol- |
| | | | | 1(or 4)- |
| | | | | monophosphatase |
| SEQ ID NO. 324 | LM-1352.1 | From 1092255 | to 1092869 | Unknown, similar to B. subtilis |
| | | | | YktB protein |
| SEQ ID NO. 325 | LM-1353.1 | From 1091110 | to 1092054 | Unknown, similar to |
| | | | | membrane and transport |
| | | | | proteins |
| SEQ ID NO. 326 | LM-1354.1 | From 1090375 | to 1091043 | Unknown, similar to ABC |
| | | | | transporter (permease) |
| SEQ ID NO. 327 | LM-1357.1 | From 1088941 | to 1090362 | Unknown, conserved |
| | | | | hypothetical protein |
| SEQ ID NO. 328 | LM-1358.1 | From 1087409 | to 1088854 | Unknown, similar to sensor |
| | | | | protein histidine kinases (2 |
| | | | | components regulatory |
| | | | | systems) |
| SEQ ID NO. 329 | LM-1359.1 | From 1086772 | to 1087434 | Unknown, similar to |
| | | | | transcription response |
| | | | | regulator |
| SEQ ID NO. 330 | LM-1360.1 | From 1086100 | to 1086630 | unknown |
| SEQ ID NO. 331 | LM-1361.1 | From 1085806 | to 1086078 | Unknown, similar to B. subtilis |
| | | | | YktA protein |
| SEQ ID NO. 332 | LM-1363.1 | From 1084853 | to 1085806 | Unknown, similar to L- |
| | | | | lactate dehydrogenase |
| SEQ ID NO. 333 | LM-1364.1 | From 1084413 | to 1084724 | unknown |
| SEQ ID NO. 334 | LM-1367.1 | From 1082822 | to 1084225 | Unknown, highly similar to |
| | | | | dihydrolipoamide |
| | | | | dehydrogenase, E3 subunit |
| | | | | of pyruvate dehydrogenase |
| | | | | complex |
| SEQ ID NO. 335 | LM-1368.1 | From 1081183 | to 1082817 | Unknown, highly similar to |
| | | | | pyruvate dehydrogenase |
| | | | | (dihydrolipoamide |
| | | | | acetyltransferase E2 |
| | | | | subunit) |
| SEQ ID NO. 336 | LM-1369.1 | From 1080095 | to 1081072 | Unknown, highly similar to |
| | | | | pyruvate dehydrogenase |
| | | | | (E1 beta subunit) |
| SEQ ID NO. 337 | LM-1370.1 | From 1078977 | to 1080092 | Unknown, highly similar to |
| | | | | pyruvate dehydrogenase |
| | | | | (E1 alpha subunit) |
| SEQ ID NO. 338 | LM-1371.1 | From 1077592 | to 1078143 | Unknown, similar to |
| | | | | formylmethionine |
| | | | | deformylase and to B. subtilis |
| | | | | YkrB protein |
| SEQ ID NO. 339 | LM-1372.1 | From 1076989 | to 1077543 | Unknown, similar to B. subtilis |
| | | | | YdfE protein |
| SEQ ID NO. 340 | LM-1373.1 | From 1075860 | to 1076858 | Unknown, similar to |
| | | | | molybdopterin biosynthesis |
| | | | | protein MoeB |
| SEQ ID NO. 341 | LM-1374.1 | From 1075360 | to 1075848 | Unknown, similar to |
| | | | | molybdenum cofactor |
| | | | | biosynthesis protein B |
| SEQ ID NO. 342 | LM-1376.1 | From 1074324 | to 1075325 | Unknown, similar to |
| | | | | molybdenum cofactor |
| | | | | biosynthesis protein A |
| SEQ ID NO. 343 | LM-1377.1 | From 1073813 | to 1074295 | Unknown, similar to |
| | | | | molybdenum cofactor |
| | | | | biosynthesis protein C |
| SEQ ID NO. 344 | LM-1379.1 | From 1073552 | to 1073800 | Unknown, similar to |
| | | | | molybdopterin converting |
| | | | | factor (subunit 1). |
| SEQ ID NO. 345 | LM-1380.1 | From 1073146 | to 1073568 | Unknown, similar to |
| | | | | molybdopterin converting |
| | | | | factor, subunit 2 |
| SEQ ID NO. 346 | LM-1381.1 | From 1072664 | to 1073149 | Unknown, similar to |
| | | | | molybdopterin-guanine |
| | | | | dinucleotide biosynthesis |
| | | | | MobB |
| SEQ ID NO. 347 | LM-1383.1 | From 1071462 | to 1072685 | Unknown, similar to |
| | | | | molybdopterin biosynthesis |
| | | | | protein moeA |
| SEQ ID NO. 348 | LM-1385.1 | From 1070597 | to 1071367 | Unknown, similar to |
| | | | | molybdate binding protein |
| SEQ ID NO. 349 | LM-1386.1 | From 1069821 | to 1070492 | Unknown, similar to |
| | | | | molybdenum transport |
| | | | | protein |
| SEQ ID NO. 350 | LM-1387.1 | From 1069156 | to 1069818 | unknown, similar to ABC |
| | | | | transporter |
| SEQ ID NO. 351 | LM-1388.1 | From 1068594 | to 1069175 | unknown, weakly similar to |
| | | | | molybdopterin-guanine |
| | | | | dinucleotide biosynthesis |
| | | | | protein A |
| SEQ ID NO. 352 | LM-1389.1 | From 1067723 | to 1068526 | unknown, highly similar to |
| | | | | B. subtilis YoaT protein |
| SEQ ID NO. 353 | LM-1390.1 | From 1066397 | to 1067662 | unknown |
| SEQ ID NO. 354 | LM-1391.1 | From 1064521 | to 1066377 | unknown, similar to |
| | | | | phosphotransferase system |
| | | | | (PTS) beta-glucoside- |
| | | | | specific enzyme IIABC |
| SEQ ID NO. 355 | LM-1392.1 | From 1063061 | to 1064524 | unknown, similar to glycerol |
| | | | | kinase |
| SEQ ID NO. 356 | LM-1394.1 | From 1062108 | to 1063064 | unknown, similar to |
| | | | | transketolase |
| SEQ ID NO. 357 | LM-1396.1 | From 1061291 | to 1062115 | unknown, similar to |
| | | | | transketolase |
| SEQ ID NO. 358 | LM-1398.3 | From 1059872 | to 1061275 | unknown, similar to |
| | | | | hypothetical proteins |
| SEQ ID NO. 359 | LM-1401.1 | From 235524 | to 237020 | lysyl-tRNA synthetase |
| SEQ ID NO. 360 | LM-1402.1 | From 234414 | to 235409 | Unknown, conserved |
| | | | | hypothetical protein |
| SEQ ID NO. 361 | LM-1404.1 | From 233858 | to 234337 | unknown, similar to 7,8- |
| | | | | dihydro-6- |
| | | | | hydroxymethylpterin |
| | | | | pyrophosphokinase |
| SEQ ID NO. 362 | LM-1405.1 | From 233491 | to 233865 | unknown, highly similar to |
| | | | | dihydroneopterin aldolase |
| SEQ ID NO. 363 | LM-1407.1 | From 232662 | to 233477 | unknown, highly similar to |
| | | | | dihydropteroate synthases |
| SEQ ID NO. 364 | LM-1408.1 | From 230840 | to 231766 | Unknown, highly similar to |
| | | | | cysteine synthase |
| SEQ ID NO. 365 | LM-1410.1 | From 229840 | to 230724 | Unknown, conserved |
| | | | | hypothetical protein |
| SEQ ID NO. 366 | LM-1411.1 | From 229045 | to 229824 | Unknown, conserved |
| | | | | hypothetical protein |
| SEQ ID NO. 367 | LM-1413.1 | From 226854 | to 228929 | Unknown, highly similar to |
| | | | | cell division protein ftsH |
| SEQ ID NO. 368 | LM-1415.1 | From 224562 | to 226508 | Unknown, fusion protein, N- |
| | | | | terminal part similar to B. subtilis |
| | | | | YacA protein, C- |
| | | | | terminal part similar to |
| | | | | hypoxanthine-guanine |
| | | | | phosphoribosyltransferase |
| SEQ ID NO. 369 | LM-1418.1 | From 224027 | to 224455 | Unknown, |
| | | | | polyribonucleotide |
| | | | | nucleotidyltransferase |
| | | | | domain present |
| SEQ ID NO. 370 | LM-1420.1 | From 223490 | to 223876 | Unknown, similar to B. subtilis |
| | | | | DivlC protein |
| SEQ ID NO. 371 | LM-1426.1 | From 221370 | to 222959 | Unknown, conserved |
| | | | | membrane-spanning protein |
| SEQ ID NO. 372 | LM-1429.1 | From 217800 | to 221339 | Transcription-repair |
| | | | | coupling factor |
| SEQ ID NO. 373 | LM-1430.1 | From 217125 | to 217685 | Unknown, similar to |
| | | | | peptidyl-tRNA hydrolase |
| SEQ ID NO. 374 | LM-1432.1 | From 216434 | to 217018 | Unknown |
| SEQ ID NO. 375 | LM-1433.2 | From 215721 | to 216344 | Unknown, similar to B. subtilis |
| | | | | general stress |
| | | | | protein |
| SEQ ID NO. 376 | LM-1434.2 | From 214486 | to 215427 | Unknown, similar to L- |
| | | | | lactate dehydrogenase |
| SEQ ID NO. 377 | LM-1435.1 | From 213735 | to 214409 | Unknown |
| SEQ ID NO. 378 | LM-1436.1 | From 213336 | to 213668 | Unknown, conserved |
| | | | | hypothetical protein |
| SEQ ID NO. 379 | LM-1437.1 | From 212824 | to 213285 | Unknown, hypothetical |
| | | | | lipoprotein |
| SEQ ID NO. 380 | LM-1438.1 | From 212366 | to 212689 | Unknown |
| SEQ ID NO. 381 | LM-1439.1 | From 211425 | to 212294 | Phospholipase C |
| SEQ ID NO. 382 | LM-1442.1 | From 209470 | to 211389 | Actin-assembly inducing |
| | | | | protein precursor |
| SEQ ID NO. 383 | LM-1444.1 | From 207739 | to 209271 | Zinc metalloproteinase |
| | | | | precursor |
| SEQ ID NO. 384 | LM-1445.1 | From 205819 | to 207408 | Listeriolysin O precursor |
| SEQ ID NO. 385 | LM-1446.1 | From 204624 | to 205577 | Phosphatidylinositol-specific |
| | | | | phospholipase c |
| SEQ ID NO. 386 | LM-1447.1 | From 203640 | to 204353 | Listeriolysin positive |
| | | | | regulatory protein |
| SEQ ID NO. 387 | LM-1448.1 | From 202641 | to 203597 | phosphoribosyl |
| | | | | pyrophosphate synthetase |
| SEQ ID NO. 388 | LM-1449.3 | From 201217 | to 202590 | Unknown, highly similar to |
| | | | | UDP-N-acetylglucosamine |
| | | | | pyrophosphorylase |
| SEQ ID NO. 389 | LM-1451.1 | From 1891236 | to 1891880 | Unknown, weakly similar to |
| | | | | thiamin pyrophosphokinase |
| SEQ ID NO. 390 | LM-1453.1 | From 1891944 | to 1892600 | Unknown, similar to |
| | | | | ribulose-5-phosphate 3- |
| | | | | epimerase |
| SEQ ID NO. 391 | LM-1454.1 | From 1892603 | to 1893478 | Unknown, similar to |
| | | | | unknown proteins |
| SEQ ID NO. 392 | LM-1457.1 | From 1893497 | to 1895464 | Unknown, similar to putative |
| | | | | serine/threonine-specific |
| | | | | protein kinase |
| SEQ ID NO. 393 | LM-1458.1 | From 1895461 | to 1896219 | Unknown, similar to putative |
| | | | | phosphoprotein |
| | | | | phosphatase |
| SEQ ID NO. 394 | LM-1459.1 | From 1896242 | to 1897576 | Unknown, similar to RNA- |
| | | | | binding Sun protein |
| SEQ ID NO. 395 | LM-1461.1 | From 1897577 | to 1898515 | Unknown, similar to |
| | | | | methionyl-tRNA |
| | | | | formyltransferase |
| SEQ ID NO. 396 | LM-1463.1 | From 1898529 | to 1900922 | Unknown, similar to |
| | | | | primosomal replication |
| | | | | factor Y |
| SEQ ID NO. 397 | LM-1465.1 | From 1900927 | to 1902126 | Unknown, similar to |
| | | | | pantothenate metabolism |
| | | | | flavoprotein homolog |
| SEQ ID NO. 398 | LM-1466.2 | From 1902484 | to 1903101 | Unknown, similar to |
| | | | | guanylate kinases |
| SEQ ID NO. 399 | LM-1467.2 | From 1903120 | to 1903995 | Unknown, simlar to |
| | | | | conserved hypothetical |
| | | | | protein |
| SEQ ID NO. 400 | LM-1468.1 | From 1904152 | to 1905864 | Unknown, similar to |
| | | | | fibronectin binding proteins |
| SEQ ID NO. 401 | LM-1469.1 | From 1905952 | to 1906551 | Unknown, similar to |
| | | | | conserved hypotheticl |
| | | | | proteins |
| SEQ ID NO. 402 | LM-1470.1 | From 1906592 | to 1907221 | Unknown, highly similar to |
| | | | | orotate |
| | | | | phosphoribosyltransferases |
| SEQ ID NO. 403 | LM-1471.1 | From 1907218 | to 1907919 | Unknown, highly similar to |
| | | | | orotidine 5-phosphate |
| | | | | decarboxylases |
| SEQ ID NO. 404 | LM-1472.1 | From 1907916 | to 1908830 | Unknown, highly similar to |
| | | | | dihydroorotase |
| | | | | dehydrogenase |
| SEQ ID NO. 405 | LM-1473.1 | From 1908827 | to 1909591 | Unknown, highly similar to |
| | | | | dihydroorotate |
| | | | | dehydrogenase (electron |
| | | | | transfer subunit) |
| SEQ ID NO. 406 | LM-1474.1 | From 1909614 | to 1912826 | Unknown, highly similar to |
| | | | | carbamoyl-phosphate |
| | | | | synthetase (catalytic |
| | | | | subunit) |
| SEQ ID NO. 407 | LM-1476.1 | From 1912819 | to 1913910 | Unknown, highly similar to |
| | | | | carbamoyl-phosphate |
| | | | | synthetase (glutaminase |
| | | | | subunit) |
| SEQ ID NO. 408 | LM-1477.1 | From 1913907 | to 1915187 | Unknown, highly similar to |
| | | | | dihydroorotase |
| SEQ ID NO. 409 | LM-1478.1 | From 1915175 | to 1916086 | Unknown, highly similar to |
| | | | | aspartate |
| | | | | carbamoyltransferase |
| SEQ ID NO. 410 | LM-1480.1 | From 1916166 | to 1917452 | Unknown, highly similar to |
| | | | | uracil permease |
| SEQ ID NO. 411 | LM-1481.2 | From 1917581 | to 1918132 | Unknown, highly similar to |
| | | | | pyrimidine operon |
| | | | | regulatory protein |
| SEQ ID NO. 412 | LM-1482.2 | From 1918363 | to 1918593 | unknown |
| SEQ ID NO. 413 | LM-1483.2 | From 645397 | to 645858 | Unknown, similar to |
| | | | | transcription regulator MarR |
| | | | | family |
| SEQ ID NO. 414 | LM-1484.1 | From 645878 | to 647590 | Unknown, similar to ABC |
| | | | | transporter, ATP-binding |
| | | | | protein |
| SEQ ID NO. 415 | LM-1486.1 | From 647587 | to 649404 | Unknown, similar to ABC |
| | | | | transporter, ATP-binding |
| | | | | protein |
| SEQ ID NO. 416 | LM-1487.1 | From 649520 | to 649819 | Unknown, similar to E. coli |
| | | | | phage shock protein E |
| SEQ ID NO. 417 | LM-1491.1 | From 651794 | to 652420 | Unknown, similar to acyl- |
| | | | | carrier protein |
| | | | | phosphodiesterase and |
| | | | | NAD(P)H dehydrogenase |
| SEQ ID NO. 418 | LM-1492.1 | From 652589 | to 653044 | Unknown, similar to |
| | | | | transcription regulator MarR |
| | | | | family |
| SEQ ID NO. 419 | LM-1493.1 | From 653041 | to 653982 | Unknown, similar to |
| | | | | oxidoreductase |
| SEQ ID NO. 420 | LM-1494.1 | From 654078 | to 654611 | Unknown, conserved |
| | | | | hypothetical protein |
| SEQ ID NO. 421 | LM-1495.1 | From 654608 | to 654850 | Unknown |
| SEQ ID NO. 422 | LM-1498.1 | From 654957 | to 656708 | Unknown, C-terminal |
| | | | | domain similar to |
| | | | | glycerophosphoryl diester |
| | | | | phosphodiesterase |
| SEQ ID NO. 423 | LM-1499.1 | From 656749 | to 657243 | Unknown |
| SEQ ID NO. 424 | LM-15.1 | From 2720497 | to 2721489 | Unknown, similar to |
| | | | | Phosphotriesterase |
| SEQ ID NO. 425 | LM-1500.1 | From 657323 | to 658465 | Unknown, similar to protein |
| | | | | kinase |
| SEQ ID NO. 426 | LM-1501.1 | From 658572 | to 659027 | Unknown |
| SEQ ID NO. 427 | LM-1502.1 | From 659083 | to 659475 | Unknown |
| SEQ ID NO. 428 | LM-1504.1 | From 659572 | to 660312 | Unknown, conserved |
| | | | | hypothetical protein |
| SEQ ID NO. 429 | LM-1506.1 | From 660398 | to 660676 | Unknown, hypothetical |
| SEQ ID NO. 430 | LM-1507.1 | From 660692 | to 660958 | Unknown |
| SEQ ID NO. 431 | LM-1508.1 | From 660996 | to 661439 | Unknown, similar to |
| | | | | unknown proteins |
| SEQ ID NO. 432 | LM-1510.3 | From 661470 | to 662171 | Unknown |
| SEQ ID NO. 433 | LM-1511.3 | From 662257 | to 663936 | Unknown, similar to |
| | | | | unknown protein |
| SEQ ID NO. 434 | LM-1516.1 | From 669423 | to 669950 | Unknown |
| SEQ ID NO. 435 | LM-1518.1 | From 670309 | to 672339 | Unknown, similar to |
| | | | | transcription antiterminator |
| | | | | BglG family |
| SEQ ID NO. 436 | LM-1519.1 | From 672341 | to 672793 | Unknown, similar to PTS |
| | | | | system, fructose-specific IIA |
| | | | | component |
| SEQ ID NO. 437 | LM-1520.1 | From 672794 | to 673855 | Unknown, similar to PTS |
| | | | | system, fructose-specific IIC |
| | | | | component |
| SEQ ID NO. 438 | LM-1521.1 | From 673870 | to 674178 | Unknown, similar to PTS |
| | | | | system, fructose-specific IIB |
| | | | | component |
| SEQ ID NO. 439 | LM-1523.1 | From 674205 | to 675473 | Unknown, similar to an E. coli |
| | | | | putative tagatose 6- |
| | | | | phosphate kinase |
| SEQ ID NO. 440 | LM-1524.1 | From 675563 | to 676267 | Unknown |
| SEQ ID NO. 441 | LM-1525.1 | From 676372 | to 676788 | Unknown, similar to |
| | | | | unknown proteins |
| SEQ ID NO. 442 | LM-1527.1 | From 676802 | to 677395 | Unknown, weakly similar to |
| | | | | methyltransferase |
| SEQ ID NO. 443 | LM-1528.1 | From 678494 | to 679123 | Unknown |
| SEQ ID NO. 444 | LM-1529.1 | From 679763 | to 680296 | Unknown, similar to a |
| | | | | transcription regulator |
| | | | | (surface protein PAg |
| | | | | negative regulator par) |
| SEQ ID NO. 445 | LM-153.1 | From 1216820 | to 1218178 | Unknown, similar to |
| | | | | cobyrinic acid a,c-diamide |
| | | | | synthase |
| SEQ ID NO. 446 | LM-1530.1 | From 680360 | to 681277 | Unknown, similar to |
| | | | | oxidoreductase |
| SEQ ID NO. 447 | LM-1532.1 | From 681543 | to 683423 | Unknown, similar to heavy |
| | | | | metal-transporting ATPase |
| SEQ ID NO. 448 | LM-1533.1 | From 683519 | to 684247 | Unknown |
| SEQ ID NO. 449 | LM-1535.1 | From 684390 | to 685040 | Unknown, similar to putative |
| | | | | transaldolase |
| SEQ ID NO. 450 | LM-1536.3 | From 685083 | to 686903 | Unknown, similar to |
| | | | | conserved hypothetical |
| | | | | proteins |
| SEQ ID NO. 451 | LM-1537.2 | From 468169 | to 469437 | Unknown, weakly similar to |
| | | | | a module of peptide |
| | | | | synthetase |
| SEQ ID NO. 452 | LM-1538.1 | From 467519 | to 468136 | unknown |
| SEQ ID NO. 453 | LM-154.1 | From 1215993 | to 1216487 | unknown |
| SEQ ID NO. 454 | LM-1540.1 | From 466517 | to 467362 | Unknown, conserved |
| | | | | hypothetical protein |
| SEQ ID NO. 455 | LM-1541.1 | From 465934 | to 466419 | Unknown, similar to |
| | | | | unknown proteins |
| SEQ ID NO. 456 | LM-1545.1 | From 459681 | to 465722 | Unknown, putative |
| | | | | peptidoglycan linked protein |
| | | | | (LPXTG motif) |
| SEQ ID NO. 457 | LM-1547.1 | From 457021 | to 458913 | Internalin B |
| SEQ ID NO. 458 | LM-1549.1 | From 454534 | to 456936 | Internalin A |
| SEQ ID NO. 459 | LM-155.1 | From 1215128 | to 1215679 | Unknown, similar to |
| | | | | transcriptional regulator |
| SEQ ID NO. 460 | LM-1551.1 | From 453107 | to 453853 | Unknown, similar to |
| | | | | oxidoreductase |
| SEQ ID NO. 461 | LM-1553.1 | From 452524 | to 453093 | Unknown, similar to |
| | | | | acetyltransferase |
| SEQ ID NO. 462 | LM-1554.1 | From 451531 | to 452406 | Unknown, similar to |
| | | | | transcriptional regulator |
| | | | | (LysR family) |
| SEQ ID NO. 463 | LM-1557.1 | From 448926 | to 451508 | Unknown, similar to sugar |
| | | | | hydrolase |
| SEQ ID NO. 464 | LM-1558.1 | From 447804 | to 448910 | Unknown, similar to PTS |
| | | | | fructose-specific enzyme IIC |
| | | | | component |
| SEQ ID NO. 465 | LM-156.1 | From 1213636 | to 1215087 | unknown |
| SEQ ID NO. 466 | LM-1560.1 | From 447471 | to 447791 | Unknown, similar to PTS |
| | | | | fructose-specific enzyme IIB |
| | | | | component |
| SEQ ID NO. 467 | LM-1561.1 | From 447010 | to 447474 | Unknown, similar to PTS |
| | | | | fructose-specific enzyme IIA |
| | | | | component |
| SEQ ID NO. 468 | LM-1564.1 | From 445049 | to 447010 | Unknown, similar to |
| | | | | transcription antiterminator |
| | | | | BglG family |
| SEQ ID NO. 469 | LM-1566.1 | From 444031 | to 444888 | Unknown, similar to |
| | | | | Staphylococcus xylosus |
| | | | | glucose uptake protein |
| SEQ ID NO. 470 | LM-1568.1 | From 443303 | to 443851 | Unknown, similar to RNA |
| | | | | polymerase ECF-type |
| | | | | sigma factor |
| SEQ ID NO. 471 | LM-1569.1 | From 442869 | to 443300 | Unknown, similar to |
| | | | | unknown protein |
| SEQ ID NO. 472 | LM-157.1 | From 1212983 | to 1213426 | Similar to ethanolamine |
| | | | | utilization protein EutQ |
| SEQ ID NO. 473 | LM-1570.1 | From 441622 | to 442872 | Unknown, similar to rod |
| | | | | shape-determining protein |
| | | | | RodA |
| SEQ ID NO. 474 | LM-1571.1 | From 440758 | to 441570 | Unknown, conserved |
| | | | | hypothetical protein |
| SEQ ID NO. 475 | LM-1572.1 | From 440056 | to 440610 | Unknown, similar to |
| | | | | unknown protein |
| SEQ ID NO. 476 | LM-1573.1 | From 439677 | to 439976 | Unknown |
| SEQ ID NO. 477 | LM-1574.1 | From 439214 | to 439624 | Unknown |
| SEQ ID NO. 478 | LM-1575.2 | From 437482 | to 438882 | Unknown, similar to endo- |
| | | | | 1,4-beta-xylanase |
| SEQ ID NO. 479 | LM-1577.4 | From 436379 | to 437188 | Unknown, conserved |
| | | | | membrane protein |
| SEQ ID NO. 480 | LM-1578.2 | From 977051 | to 9978856 | Unknown, similar to heat |
| | | | | shock protein HtpG |
| SEQ ID NO. 481 | LM-1579.1 | From 976065 | to 977039 | Unknown |
| SEQ ID NO. 482 | LM-158.1 | From 1211869 | to 1212990 | Unknown, similar to |
| | | | | ethanolamine utilization |
| | | | | protein EutH - Escherichia |
| | | | | coli |
| SEQ ID NO. 483 | LM-1580.1 | From 975071 | to 976033 | Unknown |
| SEQ ID NO. 484 | LM-1581.1 | From 974229 | to 974975 | Unknown |
| SEQ ID NO. 485 | LM-1582.1 | From 973758 | to 974216 | Unknown, similar to protein- |
| | | | | tyrosine-phosphatase |
| SEQ ID NO. 486 | LM-1583.1 | From 972719 | to 973459 | Unknown, similar to |
| | | | | Nitroflavin-reductase |
| SEQ ID NO. 487 | LM-1584.1 | From 972197 | to 972706 | Unknown, similar to B. subtilis |
| | | | | CspR protein, rRNA |
| | | | | methylase homolog |
| SEQ ID NO. 488 | LM-1585.1 | From 971037 | to 972176 | Unknown, similar to B. subtilis |
| | | | | YhbA protein |
| SEQ ID NO. 489 | LM-1586.1 | From 969549 | to 970496 | Unknown, similar to B. subtilis |
| | | | | YkcC protein |
| SEQ ID NO. 490 | LM-1587.1 | From 968819 | to 969424 | Unknown, conserved |
| | | | | hypothetical protein |
| SEQ ID NO. 491 | LM-1589.1 | From 967784 | to 968779 | Unknown, similar to lipoate |
| | | | | protein ligase A |
| SEQ ID NO. 492 | LM-159.1 | From 1211308 | to 1211853 | Unknown, similar to |
| | | | | Salmonella enterica PduT |
| | | | | protein |
| SEQ ID NO. 493 | LM-1590.1 | From 967029 | to 967760 | Unknown, conserved |
| | | | | hypothetical protein, similar |
| | | | | to B. subtilis Yhfl protein |
| SEQ ID NO. 494 | LM-1592.1 | From 966245 | to 966913 | Unknown, similar to sortase |
| SEQ ID NO. 495 | LM-1593.1 | From 965513 | to 966136 | Unknown, similar to 3- |
| | | | | methyladenine DNA |
| | | | | glycosylase |
| SEQ ID NO. 496 | LM-1594.1 | From 963294 | to 965255 | Unknown, hypothetical |
| | | | | transmembrane protein |
| SEQ ID NO. 497 | LM-1596.1 | From 962607 | to 963263 | Unknown, similar to |
| | | | | transcription regulator |
| | | | | (TetR/AcrR family) |
| SEQ ID NO. 498 | LM-1597.1 | From 961469 | to 962584 | Unknown, putative |
| | | | | membrane protein |
| SEQ ID NO. 499 | LM-16.1 | From 2721559 | to 2722857 | Unknown, similar to |
| | | | | membrane proteins |
| SEQ ID NO. 500 | LM-160.1 | From 1211046 | to 1211315 | Unknown, similar to carbondioxide |
| | | | | concentrating |
| | | | | mechanism protein |
| SEQ ID NO. 501 | LM-1600.1 | From 960748 | to 961221 | Unknown, similar to ABC |
| | | | | transporter, ATP-binding |
| | | | | protein (N-terminal part) |
| SEQ ID NO. 502 | LM-1602.1 | From 959711 | to 960631 | Unknown, similar to |
| | | | | pantothenate kinase |
| SEQ ID NO. 503 | LM-1603.1 | From 958783 | to 959622 | Unknown, similar to B. subtilis |
| | | | | YcgQ protein |
| SEQ ID NO. 504 | LM-1605.1 | From 957724 | to 958764 | Unknown, similar to B. subtilis |
| | | | | YcgR protein |
| SEQ ID NO. 505 | LM-1606.1 | From 956031 | to 957602 | Unknown, similar to ABC |
| | | | | transporter ATP-binding |
| | | | | protein (antibiotic |
| | | | | resistance) |
| SEQ ID NO. 506 | LM-1607.1 | From 953842 | to 955740 | Unknown, similar to |
| | | | | transcription antiterminator |
| | | | | BglG family |
| SEQ ID NO. 507 | LM-1608.1 | From 952318 | to 953769 | Unknown, similar to beta- |
| | | | | glucosidase |
| SEQ ID NO. 508 | LM-1609.1 | From 951956 | to 952306 | Unknown, similar to |
| | | | | phosphotransferase system |
| | | | | enzyme IIA |
| SEQ ID NO. 509 | LM-161.1 | From 1210459 | to 1211031 | unknown |
| SEQ ID NO. 510 | LM-1610.1 | From 950673 | to 951941 | Unknown, similar to |
| | | | | phosphotransferase system |
| | | | | enzyme IIC |
| SEQ ID NO. 511 | LM-1611.1 | From 950363 | to 950668 | Unknown, similar to PTS |
| | | | | system, IIB component |
| SEQ ID NO. 512 | LM-1613.1 | From 948754 | to 950220 | Unknown, similar to |
| | | | | succinate semialdehyde |
| | | | | dehydrogenase |
| SEQ ID NO. 513 | LM-1614.1 | From 947718 | to 948530 | Unknown, similar to |
| | | | | transporters (formate) |
| SEQ ID NO. 514 | LM-1615.1 | From 947101 | to 947604 | Unknown |
| SEQ ID NO. 515 | LM-1617.1 | From 945915 | to 947018 | Unknown |
| SEQ ID NO. 516 | LM-1618.1 | From 945520 | to 945912 | Unknown, similar to |
| | | | | transcription regulator, GntR |
| | | | | family |
| SEQ ID NO. 517 | LM-1619.1 | From 944243 | to 945379 | Unknown, similar to |
| | | | | membrane proteins |
| SEQ ID NO. 518 | LM-162.1 | From 1209821 | to 1210462 | Unknown, similar to |
| | | | | Salmonella enterica PduL |
| | | | | protein |
| SEQ ID NO. 519 | LM-1620.1 | From 943526 | to 944200 | Unknown, similar to |
| | | | | phosphoglycerate mutase |
| SEQ ID NO. 520 | LM-1622.1 | From 942148 | to 943497 | Unknown, similar to |
| | | | | glutathione Reductase |
| SEQ ID NO. 521 | LM-1623.1 | From 941615 | to 942112 | unknown |
| SEQ ID NO. 522 | LM-1624.2 | From 940810 | to 941484 | Unknown |
| SEQ ID NO. 523 | LM-1625.2 | From 469575 | to 470078 | Unknown |
| SEQ ID NO. 524 | LM-1626.1 | From 470122 | to 472158 | Unknown, similar to |
| | | | | penicillin-binding protein (D- |
| | | | | alanyl-D-alanine |
| | | | | carboxypeptidase) |
| SEQ ID NO. 525 | LM-1627.1 | From 472330 | to 472644 | Unknown |
| SEQ ID NO. 526 | LM-1629.1 | From 472781 | to 473710 | Unknown, similar to B. subtilis |
| | | | | transcription |
| | | | | regulator LytR |
| SEQ ID NO. 527 | LM-163.1 | From 1209053 | to 1209808 | Unknown, similar to |
| | | | | cobalamin adenosyl |
| | | | | transferase |
| SEQ ID NO. 528 | LM-1631.1 | From 473936 | to 476716 | Unknown, conserved |
| | | | | hypothetical protein |
| SEQ ID NO. 529 | LM-1632.1 | From 476960 | to 478447 | Unknown, similar to |
| | | | | transcription regulator |
| SEQ ID NO. 530 | LM-1634.1 | From 478721 | to 479710 | Unknown, similar to |
| | | | | penicillin acylase and to |
| | | | | conjugated bile acid |
| | | | | hydrolase |
| SEQ ID NO. 531 | LM-1635.1 | From 479765 | to 481153 | Unknown, similar to |
| | | | | glutamate decarboxylase |
| SEQ ID NO. 532 | LM-1636.1 | From 481250 | to 482701 | Unknown, similar to amino |
| | | | | acid antiporter |
| SEQ ID NO. 533 | LM-1637.1 | From 483166 | to 483891 | Unknown |
| SEQ ID NO. 534 | LM-1638.1 | From 483934 | to 484599 | Unknown, similar to |
| | | | | unknown proteins |
| SEQ ID NO. 535 | LM-1639.1 | From 484620 | to 485375 | Unknown |
| SEQ ID NO. 536 | LM-164.1 | From 1208603 | to 1208887 | Unknown, similar to putative |
| | | | | carboxysome structural |
| | | | | protein |
| SEQ ID NO. 537 | LM-1644.1 | From 485493 | to 487652 | Unknown, similar to |
| | | | | unknown proteins |
| SEQ ID NO. 538 | LM-1645.1 | From 487649 | to 488797 | Unknown, conserved |
| | | | | hypothetical proteins |
| SEQ ID NO. 539 | LM-1646.1 | From 488802 | to 489749 | Unknown, conserved |
| | | | | hypothetical protein similar |
| | | | | to B. subtilis YeaC |
| SEQ ID NO. 540 | LM-1647.1 | From 489905 | to 491500 | Unknown, similar to |
| | | | | unknown proteins |
| SEQ ID NO. 541 | LM-1650.1 | From 491634 | to 492917 | Unknown, similar to |
| | | | | permeases |
| SEQ ID NO. 542 | LM-1652.1 | From 492918 | to 494018 | Unknown, similar to |
| | | | | unknown proteins |
| SEQ ID NO. 543 | LM-1653.1 | From 494011 | to 495561 | Unknown, similar to |
| | | | | hydantoinase |
| SEQ ID NO. 544 | LM-1655.1 | From 496381 | to 497919 | Unknown, similar to |
| | | | | transcription regulator (VirR |
| | | | | From Streptococcus |
| | | | | pyogenes) |
| SEQ ID NO. 545 | LM-1656.1 | From 498171 | to 500240 | Unknown, putative |
| | | | | membrane associated |
| | | | | lipoprotein |
| SEQ ID NO. 546 | LM-1658.1 | From 500306 | to 500779 | Unknown |
| SEQ ID NO. 547 | LM-1659.3 | From 500799 | to 501284 | Unknown |
| SEQ ID NO. 548 | LM-166.1 | From 1207111 | to 1208571 | Unknown, similar to |
| | | | | acetaldehyde |
| | | | | dehydrogenase/alcohol |
| | | | | dehydrogenase |
| SEQ ID NO. 549 | LM-1661.4 | From 2632907 | to 2633761 | Unknown, similar to |
| | | | | fructose-1,6-bisphosphate |
| | | | | aldolase |
| SEQ ID NO. 550 | LM-1662.2 | From 2631303 | to 2632586 | Unknown, weakly similar to |
| | | | | human N- |
| | | | | acetylglucosaminyl- |
| | | | | phosphatidylinositol |
| | | | | biosynthetic protein |
| SEQ ID NO. 551 | LM-1663.1 | From 2630285 | to 2631310 | Unknown, similar to |
| | | | | galactosyltransferase |
| SEQ ID NO. 552 | LM-1664.1 | From 2629208 | to 2630278 | Unknown, conserved |
| | | | | hypothetical protein |
| SEQ ID NO. 553 | LM-1665.1 | From 2627816 | to 2629087 | Unknown, highly similar to |
| | | | | UDP-N-acetylglucosamine |
| | | | | 1-carboxyvinyltransferase |
| SEQ ID NO. 554 | LM-1666.2 | From 2626442 | to 2627713 | Unknown, highly similar to |
| | | | | transcription terminator |
| | | | | factor rho |
| SEQ ID NO. 555 | LM-1668.2 | From 2625414 | to 2626361 | Unknown, similar to glycosyl |
| | | | | transferases |
| SEQ ID NO. 556 | LM-1669.1 | From 2624980 | to 2625417 | wall teichoic acid |
| | | | | glycosylation protein GtcA |
| SEQ ID NO. 557 | LM-167.1 | From 1206590 | to 1207111 | Unknown, similar to putative |
| | | | | carboxysome structural |
| | | | | protein |
| SEQ ID NO. 558 | LM-1671.1 | From 2623125 | to 2624411 | Unknown, highly similar to |
| | | | | homoserine dehydrogenase |
| SEQ ID NO. 559 | LM-1674.1 | From 2622067 | to 2623122 | Unknown, highly similar to |
| | | | | threonine synthase |
| SEQ ID NO. 560 | LM-1676.1 | From 2621201 | to 2622067 | Unknown, highly similar to |
| | | | | homoserine kinase |
| SEQ ID NO. 561 | LM-1678.1 | From 2620514 | to 2621089 | Unknown, similar to |
| | | | | thymidine kinase |
| SEQ ID NO. 562 | LM-1679.1 | From 2619415 | to 2620491 | Unknown, highly similar to |
| | | | | peptide chain release |
| | | | | factor 1 |
| SEQ ID NO. 563 | LM-168.1 | From 1205922 | to 1206575 | Unknown, similar to putative |
| | | | | carboxysome structural |
| | | | | protein (eutL) |
| SEQ ID NO. 564 | LM-1681.1 | From 2618577 | to 2619428 | Unknown, similar to |
| | | | | protoporphyrinogen oxidase |
| SEQ ID NO. 565 | LM-1682.1 | From 2617239 | to 2618276 | Unknown, similar to yeast |
| | | | | translation initiation protein |
| SEQ ID NO. 566 | LM-1683.1 | From 2616835 | to 2617242 | Unknown, similar to |
| | | | | phosphatases |
| SEQ ID NO. 567 | LM-1684.1 | From 2615458 | to 2616699 | Unknown, highly similar to |
| | | | | glycine |
| | | | | hydroxymethyltransferase |
| SEQ ID NO. 568 | LM-1685.1 | From 2614692 | to 2615321 | Unknown, highly similar to |
| | | | | uracil |
| | | | | phosphoribosyltransferase |
| SEQ ID NO. 569 | LM-1686.1 | From 2613435 | to 2614574 | Unknown, similar to UDP-N- |
| | | | | acetylglucosamine 2- |
| | | | | epimerase |
| SEQ ID NO. 570 | LM-1691.1 | From 2612205 | to 2612603 | unknown, highly similar to |
| | | | | ATP synthase subunit i |
| SEQ ID NO. 571 | LM-1693.1 | From 2611482 | to 2612198 | unknown, highly similar to |
| | | | | H+-transporting ATP |
| | | | | synthase chain a |
| SEQ ID NO. 572 | LM-1694.1 | From 2610592 | to 2611104 | unknown, highly similar to |
| | | | | H+-transporting ATP |
| | | | | synthase chain b |
| SEQ ID NO. 573 | LM-1695.1 | From 2610056 | to 2610595 | unknown, highly similar to |
| | | | | H+-transporting ATP |
| | | | | synthase chain delta |
| SEQ ID NO. 574 | LM-1697.1 | From 2608515 | to 2610029 | unknown, highly similar to |
| | | | | H+-transporting ATP |
| | | | | synthase chain alpha |
| SEQ ID NO. 575 | LM-1698.1 | From 2607605 | to 2608477 | unknown, highly similar to |
| | | | | H+-transporting ATP |
| | | | | synthase chain gamma |
| SEQ ID NO. 576 | LM-170.1 | From 1205018 | to 1205899 | Unknown, similar to |
| | | | | ethanolamine ammonia- |
| | | | | lyase, light chain |
| SEQ ID NO. 577 | LM-1700.1 | From 2606123 | to 2607544 | unknown, highly similar to |
| | | | | H+-transporting ATP |
| | | | | synthase chain beta |
| SEQ ID NO. 578 | LM-1701.1 | From 2605697 | to 2606101 | unknown, highly similar to |
| | | | | H+-transporting ATP |
| | | | | synthase chain epsilon |
| SEQ ID NO. 579 | LM-1702.1 | From 2605337 | to 2605573 | Unknown, similar to B. subtilis |
| | | | | YwzB protein |
| SEQ ID NO. 580 | LM-1704.1 | From 2603863 | to 2605155 | unknown, UDP-N- |
| | | | | acetylglucosamine 1- |
| | | | | carboxyvinyltransferase |
| SEQ ID NO. 581 | LM-1705.2 | From 2602705 | to 2603700 | unknown, similar to MreB- |
| | | | | like protein |
| SEQ ID NO. 582 | LM-1706.2 | From 521863 | to 522591 | Unknown |
| SEQ ID NO. 583 | LM-1707.1 | From 522628 | to 523521 | Unknown, similar to |
| | | | | transcriptional regulator |
| | | | | (LysR family) |
| SEQ ID NO. 584 | LM-1708.1 | From 523719 | to 525713 | Unknown, similar to |
| | | | | NADH: flavin oxidoreductase |
| SEQ ID NO. 585 | LM-171.1 | From 1203634 | to 1204998 | Unknown, similar to |
| | | | | ethanolamine ammonia- |
| | | | | lyase, heavy chain |
| SEQ ID NO. 586 | LM-1710.1 | From 525813 | to 526688 | Unknown, similar to |
| | | | | shikimate 5-dehydrogenase |
| SEQ ID NO. 587 | LM-1712.1 | From 526754 | to 527512 | Unknown, similar to 3- |
| | | | | dehydroquinate |
| | | | | dehydratase |
| SEQ ID NO. 588 | LM-1713.1 | From 527580 | to 528488 | Unknown, similar to |
| | | | | transcriptional regulator |
| | | | | (LysR family) |
| SEQ ID NO. 589 | LM-1714.1 | From 528563 | to 530323 | Unknown, similar to acylase |
| SEQ ID NO. 590 | LM-1715.1 | From 530515 | to 531108 | Unknown, weakly similar to |
| | | | | esterase |
| SEQ ID NO. 591 | LM-1716.1 | From 531294 | to 532253 | Unknown, similar to |
| | | | | transmembrane protein |
| SEQ ID NO. 592 | LM-1717.1 | From 532328 | to 532552 | Unknown, similar to B. subtilis |
| | | | | YnzC protein |
| SEQ ID NO. 593 | LM-1718.2 | From 532603 | to 534111 | Unknown, similar to sugar |
| | | | | transferase |
| SEQ ID NO. 594 | LM-1719.1 | From 534307 | to 534756 | Unknown, similar to ribose |
| | | | | 5-phosphate isomerase |
| SEQ ID NO. 595 | LM-1721.1 | From 534753 | to 535421 | Unknown, similar to |
| | | | | ribulose-5-phosphate 3 |
| | | | | epimerase |
| SEQ ID NO. 596 | LM-1722.1 | From 535428 | to 536078 | Unknown, similar to |
| | | | | transaldolase |
| SEQ ID NO. 597 | LM-1723.1 | From 536187 | to 538247 | Unknown, similar to |
| | | | | transcription antiterminator |
| | | | | BglG family |
| SEQ ID NO. 598 | LM-1724.1 | From 538251 | to 538853 | Unknown, similar to putative |
| | | | | sugar-phosphate isomerase |
| SEQ ID NO. 599 | LM-1725.1 | From 538881 | to 539348 | Unknown, similar to PTS |
| | | | | fructose-specific enzyme IIA |
| | | | | component |
| SEQ ID NO. 600 | LM-1726.1 | From 539365 | to 539763 | Unknown |
| SEQ ID NO. 601 | LM-1727.1 | From 539774 | to 540424 | Unknown, similar to |
| | | | | ribulose-5-phosphate 3- |
| | | | | epimerase |
| SEQ ID NO. 602 | LM-1728.1 | From 540421 | to 541467 | Unknown, similar to polyol |
| | | | | (sorbitol) dehydrogenase |
| SEQ ID NO. 603 | LM-1729.1 | From 541483 | to 541776 | Unknown, similar to PTS |
| | | | | system, Galactitol-specific |
| | | | | IIB component |
| SEQ ID NO. 604 | LM-173.1 | From 1202171 | to 1203592 | Unknown, similar to |
| | | | | ethanolamine utilization |
| | | | | protein EutA (putative |
| | | | | chaperonin) |
| SEQ ID NO. 605 | LM-1731.1 | From 541791 | to 543062 | Unknown, similar to PTS |
| | | | | system, Galactitol-specific |
| | | | | IIC component |
| SEQ ID NO. 606 | LM-1733.1 | From 543202 | to 544137 | Unknown, similar to |
| | | | | phosphoribosyl |
| | | | | pyrophosphate synthetase |
| SEQ ID NO. 607 | LM-1734.1 | From 544923 | to 545501 | Unknown |
| SEQ ID NO. 608 | LM-1735.1 | From 545609 | to 546289 | Unknown, conserved |
| | | | | hypothetical protein |
| SEQ ID NO. 609 | LM-1736.1 | From 546314 | to 546673 | Unknown |
| SEQ ID NO. 610 | LM-1737.1 | From 546680 | to 547138 | Unknown, weakly similar to |
| | | | | transcription regulator |
| SEQ ID NO. 611 | LM-174.1 | From 1200625 | to 1202082 | unknown, similar to sensory |
| | | | | transduction histidine kinase |
| SEQ ID NO. 612 | LM-1740.1 | From 549438 | to 549869 | Unknown, conserved |
| | | | | hypothetical protein |
| SEQ ID NO. 613 | LM-1741.1 | From 549916 | to 551346 | Unknown, similar to Bacillus |
| | | | | anthracis encapsulation |
| | | | | protein CapA |
| SEQ ID NO. 614 | LM-1742.2 | From 551467 | to 552282 | Unknown, similar to |
| | | | | phosphoglycerate mutase |
| SEQ ID NO. 615 | LM-175.1 | From 1200051 | to 1200632 | unknown, similar to two- |
| | | | | component response |
| | | | | regulator |
| SEQ ID NO. 616 | LM-1755.2 | From 2678302 | to 2679330 | Unknown, similar to ATP |
| | | | | binding proteins |
| SEQ ID NO. 617 | LM-1757.1 | From 2681167 | to 2682018 | Unknown, similar to |
| | | | | oxidoreductase, aldo/keto |
| | | | | reductase family |
| SEQ ID NO. 618 | LM-1758.1 | From 2682040 | to 2682462 | Unknown, similar to |
| | | | | transcription regulators |
| | | | | (MerR family) |
| SEQ ID NO. 619 | LM-1759.1 | From 2682584 | to 2682943 | Unknown |
| SEQ ID NO. 620 | LM-176.1 | From 1198637 | to 1199776 | unknown, similar to |
| | | | | NADPH-dependent butanol |
| | | | | dehydrogenase |
| SEQ ID NO. 621 | LM-1760.1 | From 2683187 | to 2684056 | Unknown, similar to |
| | | | | unknown proteins |
| SEQ ID NO. 622 | LM-1761.1 | From 2684251 | to 2684643 | ribosomal protein S9 |
| SEQ ID NO. 623 | LM-1762.1 | From 2684665 | to 2685102 | ribosomal protein L13 |
| SEQ ID NO. 624 | LM-1763.1 | From 2685297 | to 2686043 | unknown, highly similar to |
| | | | | pseudouridylate synthase I |
| SEQ ID NO. 625 | LM-1766.1 | From 2686049 | to 2686846 | Unknown, highly similar to |
| | | | | B. subtilis YbaF protein |
| SEQ ID NO. 626 | LM-1769.1 | From 2686849 | to 2687715 | Uknown similar to ABC |
| | | | | transporter (ATP-binding |
| | | | | protein) |
| SEQ ID NO. 627 | LM-1771.1 | From 2687691 | to 2688530 | Unknown, similar to ABC |
| | | | | transporter (ATP-binding |
| | | | | protein) |
| SEQ ID NO. 628 | LM-1772.1 | From 2688661 | to 2689323 | Unknown, conserved |
| | | | | hypothetical protein |
| SEQ ID NO. 629 | LM-1773.1 | From 2689442 | to 2690332 | Unknown |
| SEQ ID NO. 630 | LM-1774.1 | From 2690371 | to 2691465 | Unknown |
| SEQ ID NO. 631 | LM-1775.2 | From 2691673 | to 2692080 | ribosomal protein L17 |
| SEQ ID NO. 632 | LM-1776.3 | From 1441313 | to 1441540 | Unknown |
| SEQ ID NO. 633 | LM-1777.3 | From 1441581 | to 1442114 | Unknown, modulates DNA |
| | | | | topology |
| SEQ ID NO. 634 | LM-1779.1 | From 1443873 | to 1445042 | Unknown, similar to Acetyl- |
| | | | | CoA: acetyltransferase |
| SEQ ID NO. 635 | LM-1780.2 | From 1445192 | to 1446358 | Unknown, similar to |
| | | | | hydroxy-3-methylglutaryl |
| | | | | coenzyme A synthase |
| SEQ ID NO. 636 | LM-1781.2 | From 1446383 | to 1446982 | Unknown |
| SEQ ID NO. 637 | LM-1782.1 | From 1447052 | to 1448296 | Unknown, highly similar to |
| | | | | B. subtilis YxiO protein |
| SEQ ID NO. 638 | LM-1783.1 | From 1448315 | to 1449583 | Unknown, weakly similar to |
| | | | | pyrophosphatase |
| SEQ ID NO. 639 | LM-1784.1 | From 1449647 | to 1450684 | Unknown, conserved |
| | | | | hypothetical protein |
| SEQ ID NO. 640 | LM-1785.1 | From 1450701 | to 1451597 | Unknown, weakly similar to |
| | | | | UDP-N-acetylglucosaminyl- |
| | | | | 3-enolpyruvate reductase |
| SEQ ID NO. 641 | LM-1787.1 | From 1451813 | to 1452799 | Unknown, similar to glycine |
| | | | | betaine/carnitine/choline |
| | | | | ABC transporter |
| SEQ ID NO. 642 | LM-1789.1 | From 1452796 | to 1454310 | Unknown, similar to glycine |
| | | | | betaine/carnitine/choline |
| | | | | ABC transporter (membrane |
| | | | | protein) |
| SEQ ID NO. 643 | LM-179.1 | From 1197172 | to 1198047 | unknown, similar to |
| | | | | Salmonella enterica PduX |
| | | | | protein |
| SEQ ID NO. 644 | LM-1790.1 | From 1454347 | to 1455177 | Unknown |
| SEQ ID NO. 645 | LM-1791.2 | From 1455316 | to 1456662 | Unknown, similar to metal |
| | | | | ion transport proteins |
| SEQ ID NO. 646 | LM-1794.2 | From 1456775 | to 1457446 | Unknown, similar to |
| | | | | betaine/carnitine/choline |
| | | | | ABC transporter |
| | | | | (membrane p) |
| SEQ ID NO. 647 | LM-1795.1 | From 1457461 | to 1458387 | Unknown, similar to glycine |
| | | | | betaine/carnitine/choline |
| | | | | ABC transporter |
| | | | | (osmoprotectant-binding |
| | | | | protein) |
| SEQ ID NO. 648 | LM-1796.1 | From 1458389 | to 1459045 | Unknown, similar to glycine |
| | | | | betaine/carnitine/choline |
| | | | | ABC transporter (membrane |
| | | | | protein) |
| SEQ ID NO. 649 | LM-1798.1 | From 1459049 | to 1460242 | Unknown, similar to glycine |
| | | | | betaine/carnitine/choline |
| | | | | ABC transporter (ATP- |
| | | | | binding protein) |
| SEQ ID NO. 650 | LM-1799.1 | From 1460534 | to 1461094 | Unknown, similar to |
| | | | | unknown proteins |
| SEQ ID NO. 651 | LM-18.1 | From 2722884 | to 2723156 | Unknown, similar to |
| | | | | hypothetical PTS enzyme |
| | | | | IIB component |
| SEQ ID NO. 652 | LM-1800.2 | From 1461343 | to 1461726 | Unknown, similar to |
| | | | | unknown proteins |
| SEQ ID NO. 653 | LM-1801.2 | From 1461866 | to 1463467 | Unknown, similar to ABC |
| | | | | transporter (ATP-binding |
| | | | | protein) |
| SEQ ID NO. 654 | LM-1802.1 | From 1463506 | to 1464156 | Unknown |
| SEQ ID NO. 655 | LM-1803.1 | From 1464209 | to 1465549 | Unknown, similar to |
| | | | | glutathione reductase |
| SEQ ID NO. 656 | LM-1805.1 | From 1465638 | to 1467305 | Unknown, similar to |
| | | | | unknown proteins |
| SEQ ID NO. 657 | LM-1806.1 | From 1467325 | to 1468206 | Unknown, similar to |
| | | | | dihydrodipicolinate synthase |
| SEQ ID NO. 658 | LM-1807.1 | From 1468221 | to 1469432 | Unknown, similar to |
| | | | | aspartokinase I (alpha and |
| | | | | beta subunits) |
| SEQ ID NO. 659 | LM-1809.1 | From 1469444 | to 1470487 | Unknown, similar to |
| | | | | aspartate-semialdehyde |
| | | | | dehydrogenase |
| SEQ ID NO. 660 | LM-1810.1 | From 1470685 | to 1472850 | unknown, similar to |
| | | | | penicillin-binding protein |
| SEQ ID NO. 661 | LM-1811.1 | From 1472980 | to 1473588 | superoxide dismutase |
| SEQ ID NO. 662 | LM-1813.1 | From 1473889 | to 1474689 | unknown, similar to |
| | | | | unknown proteins |
| SEQ ID NO. 663 | LM-1814.1 | From 1474802 | to 1475908 | Unknown, similar to putative |
| | | | | peptidoglycan acetylation |
| | | | | protein |
| SEQ ID NO. 664 | LM-1815.1 | From 1475944 | to 1476651 | Unknown, similar to |
| | | | | transport proteins |
| SEQ ID NO. 665 | LM-1816.1 | From 1476642 | to 1476968 | Unknown |
| SEQ ID NO. 666 | LM-1817.1 | From 1477050 | to 1477934 | Unknown, similar to protein |
| | | | | secretion PrsA (post- |
| | | | | translocation molecular |
| | | | | chaperone) |
| SEQ ID NO. 667 | LM-1818.1 | From 1478071 | to 1478496 | transcriptional regulator |
| | | | | ZurR (ferric uptake |
| | | | | regulation) |
| SEQ ID NO. 668 | LM-182.1 | From 1194890 | to 1196083 | Unknown, similar to acetate |
| | | | | kinase |
| SEQ ID NO. 669 | LM-1820.1 | From 1478477 | to 1479355 | metal transport protein |
| SEQ ID NO. 670 | LM-1821.1 | From 1479330 | to 1480103 | ABC transporter |
| SEQ ID NO. 671 | LM-1823.1 | From 1480246 | to 1481172 | Unknown, conserved |
| | | | | hypothetical protein |
| SEQ ID NO. 672 | LM-1825.1 | From 1481188 | to 1482081 | unknown, similar to |
| | | | | endonuclease IV |
| SEQ ID NO. 673 | LM-1826.1 | From 1482096 | to 1483403 | Unknown, similar to ATP- |
| | | | | dependent RNA helicase, |
| | | | | DEAD-box family (deaD) |
| SEQ ID NO. 674 | LM-1827.1 | From 1483549 | to 1484544 | Unknown, similar to E. coli |
| | | | | LytB protein |
| SEQ ID NO. 675 | LM-1829.1 | From 1484590 | to 1485711 | Unknown, conserved |
| | | | | hypothetical protein |
| SEQ ID NO. 676 | LM-183.1 | From 1194120 | to 1194824 | Unknown, similar to glycerol |
| | | | | uptake facilitator protein |
| SEQ ID NO. 677 | LM-1830.1 | From 1485708 | to 1486412 | Unknown, conserved |
| | | | | hypothetical protein |
| SEQ ID NO. 678 | LM-1833.2 | From 1486480 | to 1487604 | RNA polymerase sigma |
| | | | | factor RpoD |
| SEQ ID NO. 679 | LM-1834.2 | From 289562 | to 290521 | Unknown, similar to other |
| | | | | proteins |
| SEQ ID NO. 680 | LM-1835.1 | From 289139 | to 289555 | Unknown, similar to |
| | | | | transcriptional regulators |
| SEQ ID NO. 681 | LM-1836.1 | From 287853 | to 288992 | Unknown, similar to |
| | | | | succinyldiaminopimelate |
| | | | | desuccinylase |
| SEQ ID NO. 682 | LM-1838.1 | From 286219 | to 287718 | internalin E |
| SEQ ID NO. 683 | LM-184.1 | From 1192974 | to 1194092 | unknown, similar to |
| | | | | NADPH-dependent butanol |
| | | | | dehydrogenase |
| SEQ ID NO. 684 | LM-1840.1 | From 284365 | to 286011 | internalin H |
| SEQ ID NO. 685 | LM-1842.1 | From 282755 | to 284227 | internalin G |
| SEQ ID NO. 686 | LM-1843.1 | From 281021 | to 282481 | Unknown, similar to |
| | | | | phospho-beta-glucosidase |
| SEQ ID NO. 687 | LM-1844.1 | From 280410 | to 280955 | Unknown, similar to |
| | | | | unknown proteins |
| SEQ ID NO. 688 | LM-185.1 | From 1191549 | to 1192958 | Unknown, similar to |
| | | | | ethanolamine utilization |
| | | | | protein EutE |
| SEQ ID NO. 689 | LM-1852.1 | From 276728 | to 280333 | RNA polymerase (beta |
| | | | | subunit) |
| SEQ ID NO. 690 | LM-1854.1 | From 273003 | to 276557 | RNA polymerase (beta |
| | | | | subunit) |
| SEQ ID NO. 691 | LM-1856.2 | From 271324 | to 272502 | Unknown, similar to |
| | | | | unknown protein |
| SEQ ID NO. 692 | LM-1858.1 | From 269754 | to 270257 | Unknown, similar to |
| | | | | unknown protein |
| SEQ ID NO. 693 | LM-1859.2 | From 269067 | to 269729 | Unknown |
| SEQ ID NO. 694 | LM-1860.2 | From 1993372 | to 1994637 | Unknown, similar to |
| | | | | unknown proteins |
| SEQ ID NO. 695 | LM-1861.1 | From 1991047 | to 1993326 | Unknown, similar to |
| | | | | pyruvate formate-lyase |
| SEQ ID NO. 696 | LM-1862.1 | From 1989805 | to 1990812 | Unknown, similar to |
| | | | | peptidase |
| SEQ ID NO. 697 | LM-1863.1 | From 1988159 | to 1989802 | Unknown, similar to |
| | | | | malolactic enzyme (malate |
| | | | | dehydrogenase) |
| SEQ ID NO. 698 | LM-1864.1 | From 1987365 | to 1988048 | Unknown, similar to |
| | | | | unknown proteins |
| SEQ ID NO. 699 | LM-1865.1 | From 1986342 | to 1987346 | Unknown, similar to |
| | | | | unknown proteins |
| SEQ ID NO. 700 | LM-1866.1 | From 1985218 | to 1986345 | Unknown, similar to |
| | | | | unknown proteins |
| | | | | (hypothetical sensory |
| | | | | transduction histidine |
| | | | | kinase) |
| SEQ ID NO. 701 | LM-1867.1 | From 1984056 | to 1985192 | Unknown, similar to |
| | | | | unknown proteins |
| | | | | (hypothetical sensory |
| | | | | transduction histidine |
| | | | | kinase) |
| SEQ ID NO. 702 | LM-1869.1 | From 1982630 | to 1983736 | Unknown, similar to |
| | | | | oxidoreductases |
| SEQ ID NO. 703 | LM-1871.1 | From 1981774 | to 1982640 | Unknown, similar to |
| | | | | unknown proteins |
| SEQ ID NO. 704 | LM-1872.1 | From 1981299 | to 1981634 | Unknown, similar to |
| | | | | unknown proteins |
| SEQ ID NO. 705 | LM-1874.1 | From 1980511 | to 1981302 | Unknown, similar to |
| | | | | dihydrodipicolinate |
| | | | | reductase |
| SEQ ID NO. 706 | LM-1875.1 | From 1980091 | to 1980495 | Unknown, similar to |
| | | | | methylglyoxal synthase |
| SEQ ID NO. 707 | LM-1876.1 | From 1978895 | to 1980076 | Unknown, similar to tRNA |
| | | | | CCA-adding enzyme |
| SEQ ID NO. 708 | LM-1877.1 | From 1977928 | to 1978905 | Unknown, similar to |
| | | | | transcriptional regulator and |
| | | | | biotin acetyl-CoA- |
| | | | | carboxylase synthetase |
| SEQ ID NO. 709 | LM-1879.1 | From 1977307 | to 1977780 | unknown; similar to |
| | | | | thioredoxin |
| SEQ ID NO. 710 | LM-188.1 | From 1190547 | to 1191542 | Unknown, hyghly similar to |
| | | | | Salmonella enterica PduO |
| | | | | protein |
| SEQ ID NO. 711 | LM-1880.1 | From 1976307 | to 1977140 | unknown, similar to |
| | | | | ketopantoate |
| | | | | hydroxymethyltransferases |
| SEQ ID NO. 712 | LM-1881.1 | From 1975446 | to 1976303 | unknown, similar to |
| | | | | panthotenate synthetases |
| SEQ ID NO. 713 | LM-1882.1 | From 1975059 | to 1975442 | unknown, similar to |
| | | | | aspartate 1-decarboxylases |
| SEQ ID NO. 714 | LM-1884.1 | From 1972176 | to 1974962 | unknown, similar to ATP- |
| | | | | dependent helicases |
| SEQ ID NO. 715 | LM-1885.1 | From 1971547 | to 1972131 | unknown, similar to |
| | | | | hypothetical proteins |
| SEQ ID NO. 716 | LM-1886.1 | From 1970343 | to 1971524 | unknown, similar to |
| | | | | aspartate |
| | | | | aminotransferases |
| SEQ ID NO. 717 | LM-1888.1 | From 1969037 | to 1970329 | unknown, similar to |
| | | | | sparaginyl-tRNA |
| | | | | synthetases |
| SEQ ID NO. 718 | LM-189.1 | From 1190269 | to 1190532 | Unknown, similar to carbondioxide |
| | | | | concentrating |
| | | | | mechanism protein |
| SEQ ID NO. 719 | LM-1891.1 | From 1968169 | to 1968888 | unknown, similar to |
| | | | | chromosome replication |
| | | | | initiation protein |
| SEQ ID NO. 720 | LM-1893.1 | From 1967499 | to 1968158 | unknown, probable |
| | | | | endonuclease III (DNA |
| | | | | repair) |
| SEQ ID NO. 721 | LM-1894.1 | From 1967015 | to 1967506 | Unknown |
| SEQ ID NO. 722 | LM-1896.1 | From 1964489 | to 1966972 | unknown, similar to |
| | | | | penicillin-binding protein 2A |
| SEQ ID NO. 723 | LM-1897.2 | From 1963852 | to 1964457 | unknown, similar to DNA |
| | | | | repair and homologous |
| | | | | recombination protein |
| SEQ ID NO. 724 | LM-1898.2 | From 2208576 | to 2210351 | Unknown, similar to |
| | | | | maltogenic amylase |
| SEQ ID NO. 725 | LM-19.1 | From 2723159 | to 2723593 | Unknown, similar to |
| | | | | mannitol-specific PTS |
| | | | | enzyme IIA component |
| SEQ ID NO. 726 | LM-190.1 | From 1189785 | to 1190264 | Unknown |
| SEQ ID NO. 727 | LM-1900.1 | From 2207103 | to 2208362 | Unknown, similar to |
| | | | | maltose/maltodextrin- |
| | | | | binding protein |
| SEQ ID NO. 728 | LM-1904.1 | From 2205709 | to 2207016 | Unknown, similar to |
| | | | | maltodextrin transport |
| | | | | system permease |
| SEQ ID NO. 729 | LM-1905.1 | From 2204857 | to 2205708 | Unknown, similar to |
| | | | | maltodextrin transport |
| | | | | system permease |
| SEQ ID NO. 730 | LM-1906.1 | From 2203996 | to 2204829 | Unknown, similar to |
| | | | | maltodextrose utilization |
| | | | | protein MalA |
| SEQ ID NO. 731 | LM-1907.1 | From 2201719 | to 2203980 | Unknown, similar to |
| | | | | maltosephosphorylase |
| SEQ ID NO. 732 | LM-1908.1 | From 2200723 | to 2201544 | Unknown, similar to |
| | | | | unknown proteins |
| SEQ ID NO. 733 | LM-1910.1 | From 2199365 | to 2200723 | Unknown, similar to |
| | | | | unknown proteins |
| SEQ ID NO. 734 | LM-1911.1 | From 2197763 | to 2199115 | Unknown, similar to |
| | | | | phosphoglucomutase |
| SEQ ID NO. 735 | LM-1912.1 | From 2197267 | to 2197728 | Unknown, similar to |
| | | | | unknown proteins |
| SEQ ID NO. 736 | LM-1913.1 | From 2196382 | to 2197206 | Unknown |
| SEQ ID NO. 737 | LM-1915.1 | From 2194399 | to 2196339 | Unknown, similar to ABC |
| | | | | transporter (permease) |
| SEQ ID NO. 738 | LM-1916.1 | From 2193645 | to 2194412 | Unknown, similar to ABC |
| | | | | transporter (ATP-binding |
| | | | | protein) |
| SEQ ID NO. 739 | LM-1918.2 | From 2192693 | to 2193448 | Unknown, similar to |
| | | | | unknown proteins |
| SEQ ID NO. 740 | LM-1919.2 | From 2191525 | to 2192256 | Unknown, similar to FMN- |
| | | | | containing NADPH-linked |
| | | | | nitro/flavin reductase |
| SEQ ID NO. 741 | LM-192.1 | From 1188949 | to 1189788 | Unknown, similar to |
| | | | | ethanolamine utilization |
| | | | | protein EutJ |
| SEQ ID NO. 742 | LM-1920.1 | From 2190489 | to 2191445 | Unknown, similar to |
| | | | | mannnose-6 phospate |
| | | | | isomelase |
| SEQ ID NO. 743 | LM-1921.1 | From 2189605 | to 2190402 | Unknown, similar to |
| | | | | hydrolase |
| SEQ ID NO. 744 | LM-1922.1 | From 2188430 | to 2189563 | Unknown, similar to N- |
| | | | | acetylglucosamine-6- |
| | | | | phosphate deacetylase |
| SEQ ID NO. 745 | LM-1923.1 | From 2187663 | to 2188424 | Unknown, similar to |
| | | | | transcriptional regulator |
| | | | | (DeoR family) |
| SEQ ID NO. 746 | LM-1924.1 | From 2186557 | to 2187411 | Unknown, similar to |
| | | | | unknown proteins |
| SEQ ID NO. 747 | LM-1927.1 | From 2184344 | to 2186338 | Unknown, similar to ferrous |
| | | | | iron transport protein B |
| SEQ ID NO. 748 | LM-1930.1 | From 2182823 | to 2183800 | Unknown, similar to |
| | | | | phosphotransacetylase |
| SEQ ID NO. 749 | LM-1932.1 | From 2182218 | to 2182784 | Unknown |
| SEQ ID NO. 750 | LM-1933.2 | From 2181329 | to 2182216 | Unknown, similar to a |
| | | | | protein required for |
| | | | | pyridoxine synthesis |
| SEQ ID NO. 751 | LM-1935.1 | From 1610206 | to 1611165 | unknown, highly similar to |
| | | | | 6-phosphofructokinase |
| SEQ ID NO. 752 | LM-1936.1 | From 1611449 | to 1612405 | unknown, highly similar to |
| | | | | acetyl CoA carboxylase |
| | | | | (alpha subunit) |
| SEQ ID NO. 753 | LM-1938.1 | From 1612395 | to 1613279 | unknown, highly similar to |
| | | | | acetyl-CoA carboxylase |
| | | | | beta subunit |
| SEQ ID NO. 754 | LM-1942.1 | From 1613497 | to 1616823 | unknown, highly similar to |
| | | | | DNA polymerase III (alpha |
| | | | | subunit) DnaE |
| SEQ ID NO. 755 | LM-1944.1 | From 1616945 | to 1617880 | Unknown, similar to |
| | | | | unknown proteins |
| SEQ ID NO. 756 | LM-1945.1 | From 1617901 | to 1619214 | Unknown, similar to |
| | | | | unknown proteins |
| SEQ ID NO. 757 | LM-1946.1 | From 1619240 | to 1619926 | Unknown, similar to |
| | | | | unknown proteins |
| SEQ ID NO. 758 | LM-1947.1 | From 1620091 | to 1621188 | Unknown, similar to X-Pro |
| | | | | dipeptidase |
| SEQ ID NO. 759 | LM-1948.1 | From 1621230 | to 1622342 | Unknown, similar to alanine |
| | | | | dehydrogenase |
| SEQ ID NO. 760 | LM-1949.1 | From 1622583 | to 1623047 | Unknown, similar to |
| | | | | unknown protein |
| SEQ ID NO. 761 | LM-195.1 | From 1188293 | to 1188928 | Unknown, similar to |
| | | | | Salmonella enterica PduL |
| | | | | protein |
| SEQ ID NO. 762 | LM-1950.1 | From 1623099 | to 1624292 | unknown, highly similar to |
| | | | | acetate kinase |
| SEQ ID NO. 763 | LM-1951.1 | From 1624316 | to 1625314 | Unknown, weakly similar to |
| | | | | site specific DNA- |
| | | | | methyltransferase |
| SEQ ID NO. 764 | LM-1952.1 | From 1625505 | to 1626002 | Unknown, similar to thiol |
| | | | | peroxidases |
| SEQ ID NO. 765 | LM-1953.1 | From 1626064 | to 1626600 | Unknown, similar to |
| | | | | unknown proteins |
| SEQ ID NO. 766 | LM-1954.1 | From 1626620 | to 1627633 | Unknown, similar to |
| | | | | proteases |
| SEQ ID NO. 767 | LM-1955.1 | From 1627812 | to 1628615 | Unknown, similar to |
| | | | | unknown proteins |
| SEQ ID NO. 768 | LM-1957.1 | From 1628647 | to 1629591 | unknown, highly similar to |
| | | | | ornithine |
| | | | | carbamoyltransferase |
| SEQ ID NO. 769 | LM-1958.1 | From 1629594 | to 1630754 | unknown, highly similar to |
| | | | | N-acetylornithine |
| | | | | aminotransferase |
| SEQ ID NO. 770 | LM-1959.1 | From 1630751 | to 1631503 | unknown, highly similar to |
| | | | | N-acetylglutamate 5- |
| | | | | phosphotransferase |
| SEQ ID NO. 771 | LM-1960.1 | From 1631516 | to 1632712 | unknown, highly similar to |
| | | | | ornithine acetyltransferase |
| | | | | and amino-acid |
| | | | | acetyltransferases |
| SEQ ID NO. 772 | LM-1961.2 | From 1632728 | to 1633759 | unknown, similar to N- |
| | | | | acetylglutamate gamma- |
| | | | | semialdehyde |
| | | | | dehydrogenases |
| SEQ ID NO. 773 | LM-1962.2 | From 1633933 | to 1635144 | Unknown, similar to thiamin |
| | | | | biosynthesis protein Thil |
| SEQ ID NO. 774 | LM-1964.1 | From 1635146 | to 1636285 | Unknown, similar to iron- |
| | | | | sulfur cofactor synthesis |
| | | | | protein nifS |
| SEQ ID NO. 775 | LM-1966.2 | From 1636412 | to 1638127 | Unknown, similar to B. subtilis |
| | | | | negative regulator of |
| | | | | FtsZ ring formation (EzrA) |
| SEQ ID NO. 776 | LM-1968.2 | From 1308351 | to 1310318 | unknown, highly similar to |
| | | | | DNA gyrase-like protein |
| | | | | (subunit B) |
| SEQ ID NO. 777 | LM-197.1 | From 1187552 | to 1187989 | Unknown, similar to |
| | | | | Salmonella enterica PduK |
| | | | | protein |
| SEQ ID NO. 778 | LM-1970.1 | From 1310315 | to 1312774 | unknown, highly similar to |
| | | | | DNA gyrase-like protein |
| | | | | (subunit A) |
| SEQ ID NO. 779 | LM-1971.1 | From 1312857 | to 1313324 | Unknown, conserved |
| | | | | hypothetical protein |
| SEQ ID NO. 780 | LM-1976.1 | From 1317596 | to 1319464 | Unknown; similar to |
| | | | | acyltransferase (to B. subtilis |
| | | | | YrhL protein) |
| SEQ ID NO. 781 | LM-1978.1 | From 1319677 | to 1320375 | Unknown similar to |
| | | | | glycerophosphodiester |
| | | | | phosphodiesterase |
| SEQ ID NO. 782 | LM-1979.1 | From 1320608 | to 1322284 | Unknown, similar to glycerol |
| | | | | 3 phosphate |
| | | | | dehydrogenase |
| SEQ ID NO. 783 | LM-198.1 | From 1187192 | to 1187539 | unknown, similar to diol |
| | | | | dehydratase-reactivating |
| | | | | factor small chain |
| SEQ ID NO. 784 | LM-1980.1 | From 1322410 | to 1323327 | Unknown, similar to tRNA |
| | | | | isopentenylpyrophosphate |
| | | | | transferase |
| SEQ ID NO. 785 | LM-1981.1 | From 1323450 | to 1323683 | Unknown, similar to host |
| | | | | factor-1 protein |
| SEQ ID NO. 786 | LM-1983.1 | From 1323794 | to 1325017 | Unknown, conserved |
| | | | | hypothetical protein similar |
| | | | | to B. subtilis YnbA protein |
| SEQ ID NO. 787 | LM-1984.1 | From 1325010 | to 1326236 | Unknown, similar to |
| | | | | aluminum resistance protein |
| | | | | and to B. subtilis YnbB |
| | | | | protein |
| SEQ ID NO. 788 | LM-1985.1 | From 1326440 | to 1326808 | Unknown, similar to |
| | | | | glutamine synthetase |
| | | | | repressor |
| SEQ ID NO. 789 | LM-1986.1 | From 1326879 | to 1328213 | unknown, highly similar to |
| | | | | glutamine synthetases |
| SEQ ID NO. 790 | LM-1988.1 | From 1328357 | to 1329652 | Unknown, similar to arsenic |
| | | | | efflux pump protein |
| SEQ ID NO. 791 | LM-1989.1 | From 1329696 | to 1330217 | Unknown, conserved |
| | | | | hypothetical protein |
| SEQ ID NO. 792 | LM-1991.2 | From 1330247 | to 1330861 | unknown, highly similar to |
| | | | | SOS response regulator |
| | | | | lexA, transcription repressor |
| | | | | protein |
| SEQ ID NO. 793 | LM-1992.2 | From 1331018 | to 1331347 | unknown, similar to B. subtilis |
| | | | | YneA protein |
| SEQ ID NO. 794 | LM-1995.1 | From 1331813 | to 1333807 | unknown, highly similar to |
| | | | | transketolase |
| SEQ ID NO. 795 | LM-1996.1 | From 1334028 | to 1334267 | unknown, highly similar to |
| | | | | B. subtilis YneF protein |
| SEQ ID NO. 796 | LM-1997.1 | From 1334318 | to 1335160 | Unknown |
| SEQ ID NO. 797 | LM-1998.1 | From 1335179 | to 1335910 | unknown, weakly similar to |
| | | | | arginine N- |
| | | | | methyltransferases |
| SEQ ID NO. 798 | LM-1999.1 | From 1335932 | to 1336438 | unknown, similar to E. coli |
| | | | | YbdM protein |
| SEQ ID NO. 799 | LM-200.1 | From 1185375 | to 1187195 | diol dehydratase- |
| | | | | reactivating factor large |
| | | | | subunit |
| SEQ ID NO. 800 | LM-2000.1 | From 1336448 | to 1337752 | unknown, similar to E. coli |
| | | | | YbdN protein |
| SEQ ID NO. 801 | LM-2001.1 | From 1337742 | to 1338947 | Unknown |
| SEQ ID NO. 802 | LM-2002.1 | From 1338925 | to 1339299 | Unknown |
| SEQ ID NO. 803 | LM-2003.1 | From 1339592 | to 1340320 | unknown, highly similar to |
| | | | | uridylate kinases |
| SEQ ID NO. 804 | LM-2004.1 | From 1340320 | to 1340877 | unknown, highly similar to |
| | | | | ribosome recycling factors |
| SEQ ID NO. 805 | LM-2005.2 | From 1341107 | to 1341865 | Unknown, similar to |
| | | | | undecaprenyl diphosphate |
| | | | | synthase |
| SEQ ID NO. 806 | LM-2006.2 | From 290593 | to 291228 | Unknown, similar to |
| | | | | phosphoglycerate mutase |
| SEQ ID NO. 807 | LM-2008.1 | From 291312 | to 293198 | Unknown, similar to |
| | | | | transporter |
| SEQ ID NO. 808 | LM-2009.1 | From 293212 | to 293841 | Unknown |
| SEQ ID NO. 809 | LM-201.1 | From 1184818 | to 1185330 | Unknown, similar to diol |
| | | | | dehydrase (diol |
| | | | | dehydratase) gamma |
| | | | | subunit (pddC) |
| SEQ ID NO. 810 | LM-2010.1 | From 293845 | to 295281 | unknown, highly similar to |
| | | | | phospho-beta-glucosidase |
| SEQ ID NO. 811 | LM-2011.1 | From 295401 | to 296213 | Unknown, conserved |
| | | | | hypothetical protein similar |
| | | | | to B. subtilis YxeH protein |
| SEQ ID NO. 812 | LM-2012.1 | From 296349 | to 296852 | Unknown |
| SEQ ID NO. 813 | LM-2013.1 | From 296889 | to 297551 | Unknown |
| SEQ ID NO. 814 | LM-2014.1 | From 297810 | to 298652 | Unknown, C-terminal part |
| | | | | similar to B. subtilis ComEC |
| | | | | protein |
| SEQ ID NO. 815 | LM-2015.1 | From 298669 | to 299490 | Unknown, conserved |
| | | | | hypothetical protein |
| SEQ ID NO. 816 | LM-2017.1 | From 299607 | to 300578 | Unknown, similar to |
| | | | | oxidoreductase |
| SEQ ID NO. 817 | LM-2018.1 | From 300617 | to 301717 | Unknown, similar to sugar |
| | | | | ABC transporter, ATP- |
| | | | | binding protein |
| SEQ ID NO. 818 | LM-2019.1 | From 302008 | to 304140 | Unknown, highly similar to |
| | | | | anaerobic ribonucleoside- |
| | | | | triphosphate reductase |
| SEQ ID NO. 819 | LM-202.1 | From 1184142 | to 1184801 | Unknown, similar to diol |
| | | | | dehydrase (diol |
| | | | | dehydratase) gamma |
| | | | | subunit |
| SEQ ID NO. 820 | LM-2020.1 | From 304133 | to 304684 | Unknown, highly similar to |
| | | | | anaerobic ribonucleotide |
| | | | | reductase activator protein |
| SEQ ID NO. 821 | LM-2022.1 | From 304942 | to 305613 | Unknown |
| SEQ ID NO. 822 | LM-2023.1 | From 305775 | to 306554 | Unknown, conserved |
| | | | | hypothetical protein |
| SEQ ID NO. 823 | LM-2024.1 | From 306644 | to 307306 | Unknown, similar to ABC |
| | | | | transporter permease |
| | | | | protein |
| SEQ ID NO. 824 | LM-2026.1 | From 307303 | to 308319 | Unknown, similar to ABC |
| | | | | transporter (ATP-binding |
| | | | | protein) |
| SEQ ID NO. 825 | LM-2027.2 | From 308334 | to 309155 | Unknown, putative |
| | | | | lipoprotein |
| SEQ ID NO. 826 | LM-203.1 | From 1182440 | to 1184104 | unknown, highly similar to |
| | | | | propanediol dehydratase, |
| | | | | alpha subunit |
| SEQ ID NO. 827 | LM-2035.1 | From 2671624 | to 2672511 | Unknown, similar to |
| | | | | transcription regulator |
| | | | | TetR/AcrR family |
| SEQ ID NO. 828 | LM-2037.1 | From 2670042 | to 2671523 | Unknown, similar to drug- |
| | | | | export proteins |
| SEQ ID NO. 829 | LM-2038.1 | From 2669152 | to 2669994 | Unknown, conserved |
| | | | | hypothetical proteins |
| SEQ ID NO. 830 | LM-2039.1 | From 2665666 | to 2668653 | Unknown, similar to formate |
| | | | | dehydrogenase alpha chain |
| SEQ ID NO. 831 | LM-204.1 | From 1181720 | to 1182421 | Unknown, similar to |
| | | | | Salmonella typhimurium |
| | | | | PduB protein |
| SEQ ID NO. 832 | LM-2040.1 | From 2665190 | to 2665666 | Unknown, similar to B. subtilis |
| | | | | YrhD protein |
| SEQ ID NO. 833 | LM-2042.1 | From 2664343 | to 2665128 | Unknown, similar to formate |
| | | | | dehydrogenase associated |
| | | | | protein |
| SEQ ID NO. 834 | LM-2043.1 | From 2663619 | to 2664296 | unknown, similar to two- |
| | | | | component response |
| | | | | regulator |
| SEQ ID NO. 835 | LM-2044.1 | From 2662243 | to 2663622 | Unknown, similar to |
| | | | | response regulator histidine |
| | | | | kinase |
| SEQ ID NO. 836 | LM-2045.1 | From 2661076 | to 2662164 | Unknown, conserved |
| | | | | hypothetical protein |
| SEQ ID NO. 837 | LM-2046.1 | From 2660408 | to 2661076 | Unknown, similar to ABC |
| | | | | transporter, ATP-binding |
| | | | | protein |
| SEQ ID NO. 838 | LM-2047.1 | From 2659852 | to 2660145 | Unknown, conserved |
| | | | | hypothetical protein |
| SEQ ID NO. 839 | LM-2048.2 | From 2658966 | to 2659841 | Unknown |
| SEQ ID NO. 840 | LM-2049.3 | From 403743 | to 404198 | Unknown |
| SEQ ID NO. 841 | LM-205.1 | From 1181338 | to 1181625 | Unknown, similar to |
| | | | | Salmonella typhimurium |
| | | | | PduA protein |
| SEQ ID NO. 842 | LM-2050.1 | From 403279 | to 403725 | Unknown |
| SEQ ID NO. 843 | LM-2051.1 | From 402641 | to 403060 | Unknown |
| SEQ ID NO. 844 | LM-2053.1 | From 401619 | to 402539 | Unknown, similar to putative |
| | | | | transcription regulator |
| SEQ ID NO. 845 | LM-2054.1 | From 400997 | to 401299 | Unknown, similar to PTS |
| | | | | betaglucoside-specific |
| | | | | enzyme IIB component |
| SEQ ID NO. 846 | LM-2055.1 | From 399645 | to 400979 | Unknown, similar to PTS |
| | | | | betaglucoside-specific |
| | | | | enzyme IIC component |
| SEQ ID NO. 847 | LM-2056.1 | From 398210 | to 399652 | Unknown, similar to beta- |
| | | | | glucosidase |
| SEQ ID NO. 848 | LM-2058.1 | From 397340 | to 398053 | Unknown, similar to |
| | | | | transcription regulator |
| | | | | (GntR family) |
| SEQ ID NO. 849 | LM-2059.1 | From 396964 | to 397299 | Unknown, conserved |
| | | | | hypothetical protein |
| SEQ ID NO. 850 | LM-2060.1 | From 396208 | to 396927 | Unknown, conserved |
| | | | | hypothetical protein, highly |
| | | | | similar to B. subtilis Yeel |
| | | | | protein |
| SEQ ID NO. 851 | LM-2061.1 | From 395602 | to 396111 | Unknown, similar to |
| | | | | different proteins |
| SEQ ID NO. 852 | LM-2063.1 | From 394264 | to 395529 | Unknown, conserved |
| | | | | hypothetical protein similar |
| | | | | to B. subtilis YwbN protein |
| SEQ ID NO. 853 | LM-2064.1 | From 393086 | to 394246 | Unknown, conserved |
| | | | | hypothetical protein, |
| | | | | putative lippoprotein |
| SEQ ID NO. 854 | LM-2065.1 | From 391604 | to 393052 | Unknown, similar to |
| | | | | conserved hypothetical |
| | | | | protein |
| SEQ ID NO. 855 | LM-2066.1 | From 390529 | to 391473 | Unknown, similar to |
| | | | | transcription regulator |
| SEQ ID NO. 856 | LM-2067.1 | From 389813 | to 390430 | Unknown, similar to |
| | | | | Salmonella typhimurium |
| | | | | peptidase E |
| SEQ ID NO. 857 | LM-2068.1 | From 388807 | to 389541 | Unknown, similar to |
| | | | | conserved hypothetical |
| | | | | integral membrane protein |
| SEQ ID NO. 858 | LM-2069.1 | From 387697 | to 388467 | Unknown, similar to |
| | | | | transcriptional regulator |
| | | | | (DeoR family) |
| SEQ ID NO. 859 | LM-2070.1 | From 386780 | to 387640 | Unknown, similar to D- |
| | | | | fructose-1,6-biphosphate |
| | | | | aldolase |
| SEQ ID NO. 860 | LM-2072.1 | From 385386 | to 386780 | Unknown, similar to PTS |
| | | | | system, fructose-specific |
| | | | | enzyme IIBC component |
| SEQ ID NO. 861 | LM-2073.1 | From 384926 | to 385372 | Unknown, similar to PTS |
| | | | | system, enzyme IIA |
| | | | | component |
| SEQ ID NO. 862 | LM-2074.1 | From 383710 | to 384726 | Unknown, similar to |
| | | | | oxidoreductase |
| SEQ ID NO. 863 | LM-2076.1 | From 382016 | to 383536 | Unknown, similar to |
| | | | | Flavocytochrome C |
| | | | | Fumarate Reductase |
| | | | | chain A |
| SEQ ID NO. 864 | LM2077.1 | From 380253 | to 381779 | Unknown, similar to fatty- |
| | | | | acid-CoA ligase |
| SEQ ID NO. 865 | LM-2078.1 | From 379794 | to 380207 | Unknown, similar to |
| | | | | unknown proteins |
| SEQ ID NO. 866 | LM-2080.2 | From 378964 | to 379728 | unknown, highly similar to |
| | | | | regulatory proteins (DeoR |
| | | | | family) |
| SEQ ID NO. 867 | LM-2082.3 | From 2052233 | to 2052664 | Unknown, similar to |
| | | | | unknown proteins |
| SEQ ID NO. 868 | LM-2083.1 | From 2052816 | to 2053301 | Unknown, similar to |
| | | | | unknown proteins |
| SEQ ID NO. 869 | LM-2084.1 | From 2053274 | to 2053801 | Unknown, similar to |
| | | | | unknown proteins |
| SEQ ID NO. 870 | LM-2088.1 | From 2054493 | to 2056187 | Unknown, similar to |
| | | | | dihydroxy-acid dehydratase |
| SEQ ID NO. 871 | LM-2089.1 | From 2056205 | to 2057926 | Unknown, similar to |
| | | | | acetolactate synthase |
| | | | | (acetohydroxy-acid |
| | | | | synthase) (large subunit) |
| SEQ ID NO. 872 | LM-2091.1 | From 2057927 | to 2058418 | Unknown, similar to |
| | | | | acetolactate synthase |
| | | | | (acetohydroxy-acid |
| | | | | synthase) (small subunit) |
| SEQ ID NO. 873 | LM-2092.1 | From 2058516 | to 2059511 | Unknown, similar to ketol- |
| | | | | acid reductoisomerase |
| | | | | (acetohydroxy-acid |
| | | | | isomeroreductase) |
| SEQ ID NO. 874 | LM-2097.1 | From 2059669 | to 2061207 | Unknown, similar to 2- |
| | | | | isopropylmalate synthase |
| SEQ ID NO. 875 | LM-2098.1 | From 2061209 | to 2062261 | Unknown, similar to 3- |
| | | | | isopropylmalate |
| | | | | dehydrogenase |
| SEQ ID NO. 876 | LM-21.1 | From 2723786 | to 2725852 | Unknown, similar to |
| | | | | transcriptional |
| | | | | antiterminator |
| SEQ ID NO. 877 | LM-2100.1 | From 2062263 | to 2063651 | Unknown, similar to 3- |
| | | | | isopropylmalate |
| | | | | dehydratase (large subunit) |
| SEQ ID NO. 878 | LM-2101.1 | From 2063638 | to 2064219 | Unknown, similar to 3- |
| | | | | isopropylmalate |
| | | | | dehydratase (small subunit) |
| SEQ ID NO. 879 | LM-2102.1 | From 2064238 | to 2065506 | Unknown, similar to |
| | | | | threonine dehydratase |
| SEQ ID NO. 880 | LM-2104.1 | From 2065698 | to 2066417 | Unknown, similar to alpha- |
| | | | | acetolactate decarboxylase |
| SEQ ID NO. 881 | LM-2106.1 | From 2066455 | to 2067756 | Unknown, similar to |
| | | | | pyrimidine-nucleoside |
| | | | | phosphorylase |
| SEQ ID NO. 882 | LM-2107.3 | From 2067887 | to 2068897 | Unknown, similar to |
| | | | | transcription regulators |
| | | | | (Lacl family) |
| SEQ ID NO. 883 | LM-2109.2 | From 1677409 | to 1680009 | Unknown, similar to |
| | | | | Alcohol-acetaldehyde |
| | | | | dehydrogenase |
| SEQ ID NO. 884 | LM-2110.1 | From 1680132 | to 1680560 | Unknown, similar to |
| | | | | unknown proteins |
| SEQ ID NO. 885 | LM-2111.1 | From 1680644 | to 1681564 | Unknown, similar to similar |
| | | | | to ABC transporter (ATP- |
| | | | | binding protein) |
| SEQ ID NO. 886 | LM-2113.1 | From 1681561 | to 1682628 | Unknown, similar to |
| | | | | membrane proteins |
| SEQ ID NO. 887 | LM-2114.1 | From 1682664 | to 1683638 | Unknown, similar to |
| | | | | unknown proteins |
| SEQ ID NO. 888 | LM-2115.1 | From 1683635 | to 1684216 | Unknown, similar to dna-3- |
| | | | | methyladenine glycosidase |
| SEQ ID NO. 889 | LM-2116.1 | From 1684229 | to 1684462 | Unknown |
| SEQ ID NO. 890 | LM-2119.1 | From 1684563 | to 1687265 | unknown, highly similar to |
| | | | | aconitate hydratases |
| SEQ ID NO. 891 | LM-2120.1 | From 1687420 | to 1688223 | Unknown, similar to putative |
| | | | | sigma factor regulator |
| SEQ ID NO. 892 | LM-2121.1 | From 1688248 | to 1688670 | Unknown |
| SEQ ID NO. 893 | LM-2123.1 | From 1688670 | to 1691888 | Unknown, similar to SNF2- |
| | | | | type helicase |
| SEQ ID NO. 894 | LM-2127.1 | From 1691972 | to 1695043 | Unknown, similar to ATP- |
| | | | | dependent dsDNA |
| | | | | exonuclease SbcC |
| SEQ ID NO. 895 | LM-2128.1 | From 1695040 | to 1696164 | unknown, similar to putative |
| | | | | exonucleases SbcD |
| SEQ ID NO. 896 | LM-2129.1 | From 1696280 | to 1696888 | unknown, similar to 1- |
| | | | | acylglycerol-3-phosphate O- |
| | | | | acyltransferases |
| SEQ ID NO. 897 | LM-2130.1 | From 1696940 | to 1697302 | Unknown |
| SEQ ID NO. 898 | LM-2131.1 | From 1697476 | to 1697991 | Unknown |
| SEQ ID NO. 899 | LM-2133.1 | From 1698165 | to 1698653 | unknown, similar to |
| | | | | hypothetical proteins |
| SEQ ID NO. 900 | LM-2134.1 | From 1698734 | to 1700539 | unknown, similar to ABC |
| | | | | transporter (ATP-binding |
| | | | | protein) |
| SEQ ID NO. 901 | LM-2135.2 | From 1700523 | to 1702292 | unknown, similar to ABC |
| | | | | transporter (ATP-binding |
| | | | | protein) |
| SEQ ID NO. 902 | LM-2138.1 | From 366508 | to 367032 | Unknown |
| SEQ ID NO. 903 | LM-214.1 | From 1177116 | to 1177865 | Unknown |
| SEQ ID NO. 904 | LM-2140.1 | From 367533 | to 367901 | Unknown |
| SEQ ID NO. 905 | LM-2141.1 | From 367898 | to 369373 | Unknown |
| SEQ ID NO. 906 | LM-2142.1 | From 369377 | to 369757 | Unknown |
| SEQ ID NO. 907 | LM-2143.1 | From 370032 | to 370403 | Unknown, weakly similar to |
| | | | | inorganic pyrophosphatase |
| SEQ ID NO. 908 | LM-2145.1 | From 370732 | to 371064 | Unknown |
| SEQ ID NO. 909 | LM-2147.1 | From 371130 | to 373127 | Unknown, similar to |
| | | | | transketolase |
| SEQ ID NO. 910 | LM-2148.1 | From 373129 | to 373785 | Unknown, similar to |
| | | | | transaldolase |
| SEQ ID NO. 911 | LM-215.1 | From 1176660 | to 1177091 | unknown, similar to |
| | | | | Salmonella enterica PduV |
| | | | | protein |
| SEQ ID NO. 912 | LM-2150.1 | From 373832 | to 374596 | Unknown, similar to |
| | | | | dehydrogenase/reductase |
| SEQ ID NO. 913 | LM.-2151.1 | From 374621 | to 375067 | Unknown, similar to sugar- |
| | | | | phosphate isomerase |
| SEQ ID NO. 914 | LM-2152.1 | From 375074 | to 375838 | Unknown, similar to |
| | | | | triosephosphate isomerase |
| SEQ ID NO. 915 | LM-2154.1 | From 375842 | to 376492 | Unknown, similar to |
| | | | | dihydroxyacetone kinase |
| SEQ ID NO. 916 | LM-2155.1 | From 376514 | to 377509 | Unknown, similar to |
| | | | | dihydroxyacetone kinase |
| SEQ ID NO. 917 | LM-2156.1 | From 377531 | to 377872 | Unknown |
| SEQ ID NO. 918 | LM-2157.2 | From 377888 | to 378319 | Unknown |
| SEQ ID NO. 919 | LM-2158.2 | From 378404 | to 378781 | Unknown, similar to |
| | | | | unknown proteins |
| SEQ ID NO. 920 | LM-216.1 | From 1176304 | to 1176654 | Unknown, similar to |
| | | | | Salmonelle enterica PduU |
| | | | | protein |
| SEQ ID NO. 921 | LM-2161.2 | From 72408 | to 74222 | Unknown, similar to toxin |
| | | | | components |
| SEQ ID NO. 922 | LM-2162.1 | From 72062 | to 72394 | Unknown |
| SEQ ID NO. 923 | LM-2163.1 | From 71360 | to 72061 | Unknown |
| SEQ ID NO. 924 | LM-2164.1 | From 71064 | to 71363 | Unknown |
| SEQ ID NO. 925 | LM-2166.1 | From 70676 | to 71071 | Unknown |
| SEQ ID NO. 926 | LM-217.1 | From 1175602 | to 1176156 | Unknown, similar to |
| | | | | Salmonella enterica PduT |
| | | | | protein |
| SEQ ID NO. 927 | LM-2170.1 | From 66160 | to 70656 | Unknown, highly similar to |
| | | | | B. subtilis YukA protein |
| SEQ ID NO. 928 | LM-2171.1 | From 64950 | to 66146 | Unknown, similar to B. subtilis |
| | | | | YukC protein |
| SEQ ID NO. 929 | LM-2172.1 | From 64677 | to 64928 | Unknown, similar to B. subtilis |
| | | | | YukD protein |
| SEQ ID NO. 930 | LM-2174.1 | From 64144 | to 64659 | Unknown |
| SEQ ID NO. 931 | LM-2178.1 | From 60948 | to 64154 | Unknown, similar to B. subtilis |
| | | | | YueB protein |
| SEQ ID NO. 932 | LM-2179.1 | From 60506 | to 60799 | Unknown, similar to a small |
| | | | | heat shock protein of |
| | | | | Clostridium acetobutylicum |
| SEQ ID NO. 933 | LM-218.1 | From 1174241 | to 1175605 | unknown, similar to |
| | | | | Salmonella enterica PduS |
| | | | | protein |
| SEQ ID NO. 934 | LM-2180.2 | From 58897 | to 60189 | unknown, highly similar to |
| | | | | adenylosuccinate |
| | | | | synthetase |
| SEQ ID NO. 935 | LM-2182.2 | From 1814403 | to 1815080 | Unknown, similar to two- |
| | | | | component response |
| | | | | regulator |
| SEQ ID NO. 936 | LM-2184.1 | From 1813457 | to 1814332 | Unknown, similar to |
| | | | | unknown proteins |
| SEQ ID NO. 937 | LM-2185.1 | From 1812978 | to 1813436 | Unknown |
| SEQ ID NO. 938 | LM-2186.1 | From 1811219 | to 1812961 | unknown, highly similar to |
| | | | | adenine deaminases |
| SEQ ID NO. 939 | LM-2188.1 | From 1810157 | to 1811197 | Unknown, similar to two- |
| | | | | component sensor histidine |
| | | | | kinase |
| SEQ ID NO. 940 | LM-2189.1 | From 1809118 | to 1809759 | Unknown, similar to amino |
| | | | | acid (glutamine) ABC |
| | | | | transporter, permease |
| | | | | protein |
| SEQ ID NO. 941 | LM-2191.1 | From 1808460 | to 1809107 | Unknown, similar to amino |
| | | | | acid (glutamine) ABC |
| | | | | transporter (ATP-binding |
| | | | | protein) |
| SEQ ID NO. 942 | LM-2193.1 | From 1807643 | to 1808458 | Unknown, similar to amino |
| | | | | acid ABC transporter |
| | | | | (binding protein) |
| SEQ ID NO. 943 | LM-2194.1 | From 1806446 | to 1807552 | Unknown, similar to glycerol |
| | | | | dehydrogenase |
| SEQ ID NO. 944 | LM-2195.1 | From 1805925 | to 1806443 | Unknown, similar to |
| | | | | unknown proteins |
| SEQ ID NO. 945 | LM-2196.1 | From 1805041 | to 1805928 | transcription activator of |
| | | | | glutamate synthase operon |
| | | | | GltC |
| SEQ ID NO. 946 | LM-2199.1 | From 1800256 | to 1804848 | Unknown, similar to |
| | | | | glutamate synthase (large |
| | | | | subunit) |
| SEQ ID NO. 947 | LM-22.1 | From 2726008 | to 2727195 | unknown, highly similar to |
| | | | | translation elongation factor |
| | | | | EF-Tu |
| SEQ ID NO. 948 | LM-220.1 | From 1173643 | to 1174122 | unknown, similar to |
| | | | | uroporphyrin-III C- |
| | | | | methyltransferase |
| SEQ ID NO. 949 | LM-2201.1 | From 1798772 | to 1800241 | Unknown, similar to |
| | | | | glutamate synthase (small |
| | | | | subunit) |
| SEQ ID NO. 950 | LM-2203.1 | From 1797897 | to 1798727 | Unknown, similar to sugar |
| | | | | transport protein |
| SEQ ID NO. 951 | LM-2204.1 | From 1796987 | to 1797880 | Unknown, similar to sugar |
| | | | | transport protein |
| SEQ ID NO. 952 | LM-2205.2 | From 1795681 | to 1796925 | Unknown, similar to sugar |
| | | | | binding protein |
| SEQ ID NO. 953 | LM-2207.2 | From 2505425 | to 2505835 | Unknown |
| SEQ ID NO. 954 | LM-2209.1 | From 2505858 | to 2506370 | Unknown |
| SEQ ID NO. 955 | LM-221.1 | From 1173144 | to 1173551 | Unknown |
| SEQ ID NO. 956 | LM-2210.1 | From 2506494 | to 2506835 | Unknown |
| SEQ ID NO. 957 | LM-2212.1 | From 2506867 | to 2507250 | Unknown |
| SEQ ID NO. 958 | LM-2213.1 | From 2507306 | to 2508202 | Unknown, similar to |
| | | | | transcription regulator |
| SEQ ID NO. 959 | LM-2214.1 | From 2508247 | to 2508816 | Unknown |
| SEQ ID NO. 960 | LM-2215.1 | From 2508992 | to 2509411 | Unknown |
| SEQ ID NO. 961 | LM-2216.1 | From 2510361 | to 2514293 | Unknown, similar to |
| | | | | glycosidase |
| SEQ ID NO. 962 | LM-2217.1 | From 2514308 | to 2515210 | Unknown, similar to |
| | | | | internalin |
| SEQ ID NO. 963 | LM-2219.1 | From 2515312 | to 2518587 | Unknown, similar to |
| | | | | glycosidase |
| SEQ ID NO. 964 | LM-2220.1 | From 2518971 | to 2519879 | Unknown, similar to |
| | | | | transcription regulator |
| SEQ ID NO. 965 | LM-2221.1 | From 2519935 | to 2520399 | Unknown, conserved |
| | | | | hypothetical protein |
| SEQ ID NO. 966 | LM-2222.1 | From 2520415 | to 2522796 | Unknown, similar to |
| | | | | exoribonuclease RNase-R |
| SEQ ID NO. 967 | LM-2224.2 | From 2522830 | to 2523576 | Unknown, similar to |
| | | | | carboxylesterase |
| SEQ ID NO. 968 | LM-2225.2 | From 2343056 | to 2343685 | Unknown, similar to |
| | | | | phosphoglucomutase |
| SEQ ID NO. 969 | LM-2226.1 | From 2341865 | to 2343013 | Unknown, similar to |
| | | | | aspartate aminotransferase |
| SEQ ID NO. 970 | LM-2227.1 | From 2341064 | to 2341789 | Unknown, similar to amino |
| | | | | acid ABC transporter (ATP- |
| | | | | binding protein) |
| SEQ ID NO. 971 | LM-2228.1 | From 2339611 | to 2341071 | Unknown, similar to amino |
| | | | | acid ABC transporter, |
| | | | | permease protein |
| SEQ ID NO. 972 | LM-2229.1 | From 2338420 | to 2339418 | Unknown, similar to low- |
| | | | | affinity inorganic phosphate |
| | | | | transporter |
| SEQ ID NO. 973 | LM-223.1 | From 1172797 | to 1173036 | Unknown |
| SEQ ID NO. 974 | LM-2230.1 | From 2337786 | to 2338406 | Unknown, similar to |
| | | | | unknown proteins |
| SEQ ID NO. 975 | LM-2232.1 | From 2336515 | to 2337399 | Unknown, similar to |
| | | | | oxidoreductase |
| SEQ ID NO. 976 | LM-2233.1 | From 2335862 | to 2336518 | Unknown, similar to |
| | | | | unknown proteins |
| SEQ ID NO. 977 | LM-2234.1 | From 2335468 | to 2335860 | Unknown, similar to |
| | | | | unknown proteins |
| SEQ ID NO. 978 | LM-2235.1 | From 2334586 | to 2335455 | Unknown, similar to putative |
| | | | | ribosomal large subunit |
| | | | | pseudouridine synthase |
| SEQ ID NO. 979 | LM-2236.1 | From 2334003 | to 2334569 | Unknown, similar to |
| | | | | methylphosphotriester-DNA |
| | | | | alkyltransferase and |
| | | | | transcriptional regulator |
| SEQ ID NO. 980 | LM-2237.1 | From 2333375 | to 2333857 | Unknown, similar to O6- |
| | | | | methylguanine-DNA |
| | | | | methyltransferase |
| SEQ ID NO. 981 | LM-2238.1 | From 2332888 | to 2333283 | Unknown, similar to |
| | | | | transcriptional regulators |
| | | | | (GntR family) |
| SEQ ID NO. 982 | LM-2239.1 | From 2332020 | to 2332898 | Unknown, similar to ABC |
| | | | | transporter (ATP-binding |
| | | | | protein) |
| SEQ ID NO. 983 | LM-224.1 | From 1172076 | to 1172648 | Unknown, similar to ATP- |
| | | | | dependent Clp protease |
| | | | | proteolytic component |
| SEQ ID NO. 984 | LM-2241.1 | From 2330959 | to 2332023 | Unknown |
| SEQ ID NO. 985 | LM-2242.1 | From 2329731 | to 2330921 | Unknown, similar to |
| | | | | transport system permease |
| | | | | protein |
| SEQ ID NO. 986 | LM-2244.1 | From 2328363 | to 2329571 | Unknown, similar to |
| | | | | transport system permease |
| | | | | protein |
| SEQ ID NO. 987 | LM-2246.1 | From 2327461 | to 2328330 | Unknown, similar to |
| | | | | oxidoreductase |
| SEQ ID NO. 988 | LM-2248.1 | From 2325477 | to 2327402 | Unknown, similar to NADH |
| | | | | oxidase |
| SEQ ID NO. 989 | LM-225.1 | From 1171662 | to 1172009 | Unknown |
| SEQ ID NO. 990 | LM-2250.1 | From 2324554 | to 2325408 | Unknown, similar to |
| | | | | unknown proteins |
| SEQ ID NO. 991 | LM-2251.1 | From 2323375 | to 2324253 | Unknown, similar to |
| | | | | transcriptional regulators |
| | | | | (LysR family) |
| SEQ ID NO. 992 | LM-2253.1 | From 2322031 | to 2323335 | Unknown, similar to |
| | | | | unknown proteins |
| SEQ ID NO. 993 | LM-2254.2 | From 2320906 | to 2321775 | Unknown, similar to |
| | | | | unknown proteins |
| SEQ ID NO. 994 | LM-2255.2 | From 2320416 | to 2320841 | Unknown, similar to |
| | | | | arsenate reductase |
| SEQ ID NO. 995 | LM-2256.3 | From 1405578 | to 1405859 | Unknown |
| SEQ ID NO. 996 | LM-2257.3 | From 1404714 | to 1405541 | Unknown, similar to B. subtilis |
| | | | | SpoIIIJ protein |
| SEQ ID NO. 997 | LM-2258.3 | From 1403227 | to 1404678 | two-component sensor |
| | | | | histidine kinase |
| SEQ ID NO. 998 | LM-2260.1 | From 1402550 | to 1403230 | two-component response |
| | | | | regulator |
| SEQ ID NO. 999 | LM-2261.2 | From 1400941 | to 1402359 | Unknown, similar to 6- |
| | | | | phosphogluconate |
| | | | | dehydrogenase |
| SEQ ID NO. 1000 | LM-2262.2 | From 1399699 | to 1400796 | Unknown, similar to |
| | | | | aminotripeptidase |
| SEQ ID NO. 1001 | LM-2263.1 | From 1398077 | to 1399327 | Unknown, similar to |
| | | | | branched-chain alpha-keto |
| | | | | acid dehydrogenase E2 |
| | | | | subunit (lipoamide |
| | | | | acyltransferase) |
| SEQ ID NO. 1002 | LM-2266.1 | From 1397063 | to 1398046 | Unknown, similar to |
| | | | | branched-chain alpha-keto |
| | | | | acid dehydrogenase E1 |
| | | | | subunit (2-oxoisovalerate |
| | | | | dehydrogenase beta |
| | | | | subunit) |
| SEQ ID NO. 1003 | LM-2267.1 | From 1396051 | to 1397046 | Unknown, similar to |
| | | | | branched-chain alpha-keto |
| | | | | acid dehydrogenase E1 |
| | | | | subunit (2-oxoisovalerate |
| | | | | dehydrogenase alpha |
| | | | | subunit) |
| SEQ ID NO. 1004 | LM-2269.1 | From 1394599 | to 1396026 | Unknown, similar to |
| | | | | branched-chain alpha-keto |
| | | | | acid dehydrogenase E3 |
| | | | | subunit |
| SEQ ID NO. 1005 | LM-2270.1 | From 1393517 | to 1394584 | Unknown, similar to |
| | | | | branched-chain fatty-acid |
| | | | | kinase |
| SEQ ID NO. 1006 | LM-2271.1 | From 1392514 | to 1393380 | Unknown, similar to |
| | | | | phosphotransbutyrylase |
| SEQ ID NO. 1007 | LM-2273.1 | From 1390694 | to 1392385 | DNA repair and genetic |
| | | | | recombination |
| SEQ ID NO. 1008 | LM-2274.1 | From 1390222 | to 1390671 | Unknown, similar to arginine |
| | | | | repressor |
| SEQ ID NO. 1009 | LM-2275.1 | From 1389207 | to 1390031 | Unknown, conserved |
| | | | | hypothetical protein |
| SEQ ID NO. 1010 | LM-2276.1 | From 1387396 | to 1389210 | Unknown, similar to D-1- |
| | | | | deoxyxylulose 5-phosphate |
| | | | | synthase |
| SEQ ID NO. 1011 | LM-2278.1 | From 1385934 | to 1386815 | Unknown, similar to |
| | | | | geranyltranstransferase |
| SEQ ID NO. 1012 | LM-2280.1 | From 1384362 | to 1385714 | Unknown, similar to |
| | | | | exodeoxyribonuclease VII |
| | | | | (large subunit) |
| SEQ ID NO. 1013 | LM-2283.1 | From 1383489 | to 1384343 | unknown, highly similar to |
| | | | | methylenetetrahydrofolate |
| | | | | dehydrogenase and |
| | | | | methenyltetrahydrofolate |
| | | | | cyclohydrolase |
| SEQ ID NO. 1014 | LM-2284.1 | From 1383007 | to 1383393 | Unknown, similar to |
| | | | | transcription termination |
| | | | | protein (NusB) |
| SEQ ID NO. 1015 | LM-2285.1 | From 1382569 | to 1382976 | unknown, similar to B. subtilis |
| | | | | YqhY protein |
| SEQ ID NO. 1016 | LM-2287.3 | From 1381201 | to 1382565 | acetyl-CoA carboxylase |
| | | | | subunit (biotin carboxylase |
| | | | | subunit) |
| SEQ ID NO. 1017 | LM-2289.3 | From 1380720 | to 1381187 | Unknown, similar to acetyl- |
| | | | | CoA carboxylase subunit |
| | | | | (biotin carboxyl carrier |
| | | | | subunit) |
| SEQ ID NO. 1018 | LM-2290.3 | From 1380004 | to 1380561 | unknown, highly similar to |
| | | | | elongation factor P (EF-P) |
| SEQ ID NO. 1019 | LM-2291.2 | From 1275845 | to 1276693 | unknown, similar to B. subtilis |
| | | | | YxkD protein |
| SEQ ID NO. 1020 | LM-2292.1 | From 1274883 | to 1275542 | unknown, similar to |
| | | | | regulator of the Fnr CRP |
| | | | | family (including PrfA) |
| SEQ ID NO. 1021 | LM-2293.1 | From 1273473 | to 1274678 | unknown; similar to |
| | | | | antibiotic resistance protein |
| SEQ ID NO. 1022 | LM-2294.1 | From 1273231 | to 1273476 | Unknown |
| SEQ ID NO. 1023 | LM-2295.1 | From 1272717 | to 1273193 | unknown, weakly similar to |
| | | | | 8-oxo-dGTPase (mutT) |
| SEQ ID NO. 1024 | LM-2296.1 | From 1272286 | to 1272549 | Unknown |
| SEQ ID NO. 1025 | LM-2298.1 | From 1270849 | to 1272261 | Unknown, similar to ATP- |
| | | | | dependent RNA helicase |
| | | | | (DEAD motif) |
| SEQ ID NO. 1026 | LM-2299.1 | From 1269834 | to 1270433 | unknown weakly similar to |
| | | | | phosphoglycerate mutase 1 |
| SEQ ID NO. 1027 | LM-230.1 | From 1168390 | to 1169541 | Unknown |
| SEQ ID NO. 1028 | LM-2300.1 | From 1269262 | to 1269669 | Unknown |
| SEQ ID NO. 1029 | LM-2301.1 | From 1268515 | to 1269108 | unknown, similar to B. subtilis |
| | | | | Ydel protein |
| SEQ ID NO. 1030 | LM-2302.1 | From 1267115 | to 1268473 | Unknown |
| SEQ ID NO. 1031 | LM-2303.1 | From 1266040 | to 1266564 | unknown, conserved |
| | | | | hypothetical protein, similar |
| | | | | to B. subtilis YsnB protein |
| SEQ ID NO. 1032 | LM-2304.1 | From 1265392 | to 1266003 | unknown, conserved |
| | | | | hypothetical protein, similar |
| | | | | to B. subtilis YsnA protein |
| SEQ ID NO. 1033 | LM-2305.1 | From 1264642 | to 1265388 | Unknown, similar to |
| | | | | ribonuclease PH |
| SEQ ID NO. 1034 | LM-2306.1 | From 1263829 | to 1264629 | Unknown, similar to |
| | | | | glutamate racemase |
| SEQ ID NO. 1035 | LM-2307.1 | From 1263187 | to 1263681 | unknown, similar to B. subtilis |
| | | | | YslB protein |
| SEQ ID NO. 1036 | LM-2308.1 | From 1261917 | to 1263131 | Unknown, similar to |
| | | | | aspartokinase II alpha |
| | | | | subunit |
| SEQ ID NO. 1037 | LM-231.1 | From 1168021 | to 1168368 | unknown, similar to |
| | | | | regulatory proteins |
| SEQ ID NO. 1038 | LM-2310.1 | From 1259917 | to 1261728 | unknown, highly similar to |
| | | | | excinuclease ABC |
| | | | | subunit C |
| SEQ ID NO. 1039 | LM-2312.1 | From 1259530 | to 1259841 | Thioredoxin |
| SEQ ID NO. 1040 | LM-2315.1 | From 1257092 | to 1259449 | unknown, similar to MutS |
| | | | | protein (MutS2) |
| SEQ ID NO. 1041 | LM-2317.1 | From 1255357 | to 1257069 | unknown, similar to DNA |
| | | | | polymerase beta, to B. subtilis |
| | | | | YshC protein |
| SEQ ID NO. 1042 | LM-2318.3 | From 1254722 | to 1255264 | unknown, similar to B. subtilis |
| | | | | YshB protein |
| SEQ ID NO. 1043 | LM-2319.2 | From 347658 | to 348428 | Unknown, similar to |
| | | | | unknown proteins |
| SEQ ID NO. 1044 | LM-232.1 | From 1167645 | to 1167953 | unknown, similar to B. subtilis |
| | | | | YjcS protein |
| SEQ ID NO. 1045 | LM-2320.1 | From 347219 | to 347611 | Unknown, similar to |
| | | | | unknown proteins |
| SEQ ID NO. 1046 | LM-2322.1 | From 346377 | to 347036 | Unknown, similar to |
| | | | | unknown proteins |
| SEQ ID NO. 1047 | LM-2324.1 | From 343221 | to 344636 | Unknown, similar to |
| | | | | phospho-beta-glucosidase |
| SEQ ID NO. 1048 | LM-2325.1 | From 342551 | to 343195 | Unknown, similar to thiamin- |
| | | | | phosphate |
| | | | | pyrophosphorylase (ThiE) |
| SEQ ID NO. 1049 | LM-2327.1 | From 341751 | to 342554 | Unknown, similar to |
| | | | | phosphomethylpyrimidine |
| | | | | kinase (ThiD) |
| SEQ ID NO. 1050 | LM-2329.1 | From 340945 | to 341754 | Unknown, similar to |
| | | | | hydroxyethylthiazole kinase |
| | | | | (ThiM) |
| SEQ ID NO. 1051 | LM-2332.1 | From 340278 | to 340952 | Unknown, similar to thiamin |
| | | | | biosynthesis protein |
| SEQ ID NO. 1052 | LM-2333.1 | From 339270 | to 340055 | Unknown, similar to |
| | | | | unknown protein |
| SEQ ID NO. 1053 | LM-2334.1 | From 338341 | to 339087 | Unknown, conserved |
| | | | | hypothetical protein |
| SEQ ID NO. 1054 | LM-2335.2 | From 337161 | to 338363 | Unknown, similar to |
| | | | | unknown proteins |
| SEQ ID NO. 1055 | LM-2336.3 | From 336541 | to 337161 | Unknown |
| SEQ ID NO. 1056 | LM-2338.2 | From 1026871 | to 1029045 | ATP-dependent protease |
| SEQ ID NO. 1057 | LM-2339.1 | From 1026376 | to 1026855 | unknown, similar to |
| | | | | methylated-DNA-protein- |
| | | | | cystein methyltransferase |
| SEQ ID NO. 1058 | LM-234.1 | From 1165962 | to 1167608 | unknown, similar to ABC |
| | | | | transporters, ATP-binding |
| | | | | proteins (HI0664) |
| SEQ ID NO. 1059 | LM-2340.1 | From 1025159 | to 1026190 | unknown, similar to B. subtilis |
| | | | | YkrP protein |
| SEQ ID NO. 1060 | LM-2341.1 | From 1024761 | to 1025129 | Unknown |
| SEQ ID NO. 1061 | LM-2342.1 | From 1023346 | to 1024680 | unknown, similar to Na+- |
| | | | | transporting ATP synthase |
| | | | | subunit J |
| SEQ ID NO. 1062 | LM-2344.1 | From 1022535 | to 1023302 | unknown, conserved |
| | | | | hypothetical protein |
| SEQ ID NO. 1063 | LM-2345.1 | From 1021665 | to 1022432 | unknown, conserved |
| | | | | hypothetical protein |
| SEQ ID NO. 1064 | LM-2346.1 | From 1020022 | to 1021383 | unknown, conserved |
| | | | | hypothetical protein |
| SEQ ID NO. 1065 | LM-2347.1 | From 1019545 | to 1019970 | unknown, similar to |
| | | | | regulatory proteins (MarR |
| | | | | family) |
| SEQ ID NO. 1066 | LM-2348.1 | From 1017870 | to 1019438 | unknown, similar to peptide |
| | | | | chain release factor 3 |
| | | | | (RF-3) |
| SEQ ID NO. 1067 | LM-2349.1 | From 1016934 | to 1017788 | unknown, similar to |
| | | | | Streptococcus agalactiae |
| | | | | CylB protein |
| SEQ ID NO. 1068 | LM-235.2 | From 1164245 | to 1165960 | ATP-binding transport |
| | | | | protein |
| SEQ ID NO. 1069 | LM-2350.1 | From 1016030 | to 1016941 | unknown, similar to |
| | | | | antibiotic ABC transporter, |
| | | | | ATP-binding protein, |
| SEQ ID NO. 1070 | LM-2351.1 | From 1015605 | to 1016033 | Unknown |
| SEQ ID NO. 1071 | LM-2352.1 | From 1015153 | to 1015608 | unknown, weakly similar to |
| | | | | two-component response |
| | | | | regulator |
| SEQ ID NO. 1072 | LM-2353.1 | From 1014540 | to 1015019 | unknown, similar to |
| | | | | glutathione peroxidase |
| SEQ ID NO. 1073 | LM-2355.1 | From 1013475 | to 1014527 | unknown, similar to |
| | | | | glucanase and peptidase |
| SEQ ID NO. 1074 | LM-2358.1 | From 1011860 | to 1013335 | unknown, similar to efflux |
| | | | | transporter |
| SEQ ID NO. 1075 | LM-2359.1 | From 1011074 | to 1011826 | unknown, similar to ABC |
| | | | | transporter transmembrane |
| | | | | component |
| SEQ ID NO. 1076 | LM-236.2 | From 1163277 | to 1163996 | unknown, similar to |
| | | | | transcription regulators |
| SEQ ID NO. 1077 | LM-2361.1 | From 1010313 | to 1011077 | unknown, similar to |
| | | | | daunorubicin resistance |
| | | | | ATP-binding proteins |
| SEQ ID NO. 1078 | LM-2362.1 | From 1009098 | to 1010117 | unknown; similar to |
| | | | | branched-chain amino acid |
| | | | | aminotransferase |
| SEQ ID NO. 1079 | LM-2363.1 | From 1008130 | to 1008879 | unknown, similar to B. subtilis |
| | | | | YjcH protein |
| SEQ ID NO. 1080 | LM-2364.1 | From 1007669 | to 1008112 | unknown, similar to B. subtilis |
| | | | | YjcF protein |
| SEQ ID NO. 1081 | LM-2365.2 | From 1006959 | to 1007633 | unknown, similar to ribose |
| | | | | 5-phosphate isomerase |
| SEQ ID NO. 1082 | LM-2366.2 | From 1937783 | to 1938415 | unknown, similar to |
| | | | | hemolysinIII proteins, |
| | | | | putative integral membrane |
| | | | | protein |
| SEQ ID NO. 1083 | LM-2368.1 | From 1938538 | to 1939155 | unknown, similar to |
| | | | | conserved hypothetical |
| | | | | proteins |
| SEQ ID NO. 1084 | LM-2369.1 | From 1939168 | to 1939980 | unknown, similar to |
| | | | | conserved hypothetical |
| | | | | proteins |
| SEQ ID NO. 1085 | LM-237.1 | From 1162666 | to 1163280 | Unknown, similar to |
| | | | | unknown proteins |
| SEQ ID NO. 1086 | LM-2371.1 | From 1939999 | to 1942638 | unknown, similar to |
| | | | | pyruvate phosphate |
| | | | | dikinase |
| SEQ ID NO. 1087 | LM-2372.1 | From 1942687 | to 1943064 | unknown, similar to |
| | | | | conserved hypothetical |
| | | | | proteins |
| SEQ ID NO. 1088 | LM-2373.1 | From 1943068 | to 1944051 | unknown, similar to |
| | | | | conserved hypothetical |
| | | | | proteins, putative integral |
| | | | | membrane protein |
| SEQ ID NO. 1089 | LM-2375.1 | From 1944145 | to 1944768 | unknown; similar to alkaline |
| | | | | phosphatase |
| SEQ ID NO. 1090 | LM-2378.1 | From 1944908 | to 1946419 | unknown, similar to |
| | | | | phosphoglucomutases |
| SEQ ID NO. 1091 | LM-2379.1 | From 1946488 | to 1947363 | unknown, similar to |
| | | | | methyltransferases |
| SEQ ID NO. 1092 | LM-238.1 | From 1161689 | to 1162696 | Unknown |
| SEQ ID NO. 1093 | LM-2380.1 | From 1947416 | to 1947898 | unknown, similar to |
| | | | | dihydrofolate reductases |
| SEQ ID NO. 1094 | LM-2381.1 | From 1947914 | to 1948858 | unknown, similar to |
| | | | | thymidylate synthase |
| SEQ ID NO. 1095 | LM-2385.1 | From 1948871 | to 1950763 | unknown, similar to putative |
| | | | | ABC transporters (ATP- |
| | | | | binding protein) |
| SEQ ID NO. 1096 | LM-2386.1 | From 1950883 | to 1951305 | Unknown, similar to formyltetrahydrofolate |
| | | | | synthetase |
| | | | | C-terminal part |
| SEQ ID NO. 1097 | LM-2387.2 | From 1951284 | to 1952564 | Unknown, similar to formyltetrahydrofolate |
| | | | | synthetase |
| | | | | N-terminal part |
| SEQ ID NO. 1098 | LM-2388.2 | From 1952721 | to 1953149 | unknown, similar to |
| | | | | transcriptional regulators |
| SEQ ID NO. 1099 | LM-239.1 | From 1161220 | to 1161675 | Unknown |
| SEQ ID NO. 1100 | LM-2390.2 | From 148354 | to 150009 | Unknown, similar to ABC |
| | | | | transporter oligopeptide- |
| | | | | binding protein |
| SEQ ID NO. 1101 | LM-2391.1 | From 147884 | to 148291 | Unknown |
| SEQ ID NO. 1102 | LM-2392.1 | From 147399 | to 147764 | Unknown |
| SEQ ID NO. 1103 | LM-2393.1 | From 146764 | to 147381 | |
| SEQ ID NO. 1104 | LM-2394.1 | From 146306 | to 146656 | Unknown |
| SEQ ID NO. 1105 | LM-2395.1 | From 145869 | to 146306 | Unknown |
| SEQ ID NO. 1106 | LM-2397.1 | From 144397 | to 144840 | Unknown |
| SEQ ID NO. 1107 | LM-2398.1 | From 144097 | to 144273 | Unknown |
| SEQ ID NO. 1108 | LM-24.1 | From 2727304 | to 2729391 | unknown, highly similar to |
| | | | | translation elongation |
| | | | | factor G |
| SEQ ID NO. 1109 | LM-240.1 | From 1160778 | to 1161230 | unknown, similar to E. coli |
| | | | | YjaB protein |
| SEQ ID NO. 1110 | LM-2400.1 | From 143366 | to 143722 | Unknown |
| SEQ ID NO. 1111 | LM-2401.1 | From 141618 | to 143006 | Unknown |
| SEQ ID NO. 1112 | LM-2402.1 | From 141337 | to 141705 | Unknown |
| SEQ ID NO. 1113 | LM-2404.1 | From 141052 | to 141336 | Unknown |
| SEQ ID NO. 1114 | LM-2406.1 | From 139960 | to 140853 | Unknown, similar to |
| | | | | oligopeptide ABC |
| | | | | transporter, permease |
| | | | | protein |
| SEQ ID NO. 1115 | LM-2409.1 | From 138999 | to 139949 | Unknown, similar to |
| | | | | oligopeptide ABC |
| | | | | transporter, permease |
| | | | | protein |
| SEQ ID NO. 1116 | LM-241.2 | From 1160220 | to 1160753 | Unknown |
| SEQ ID NO. 1117 | LM-2411.2 | From 137323 | to 138897 | Unknown, similar to |
| | | | | oligopeptide ABC transport |
| | | | | system substrate-binding |
| | | | | proteins |
| SEQ ID NO. 1118 | LM-2412.2 | From 2164106 | to 2165377 | Unknown, weakly similar to |
| | | | | transcription regulators |
| SEQ ID NO. 1119 | LM-2414.1 | From 2166012 | to 2167343 | Unknown, similar to |
| | | | | unknown proteins |
| SEQ ID NO. 1120 | LM-2415.1 | From 2167353 | to 2167943 | Unknown, similar to |
| | | | | transcription regulators |
| SEQ ID NO. 1121 | LM-2416.1 | From 2168054 | to 2169097 | Unknown, similar to lipases |
| SEQ ID NO. 1122 | LM-2417.1 | From 2169312 | to 2170526 | Unknown, similar to |
| | | | | argininosuccinate synthase |
| SEQ ID NO. 1123 | LM-2418.1 | From 2170530 | to 2171900 | Unknown, similar to |
| | | | | argininosuccinate lyase |
| SEQ ID NO. 1124 | LM-242.2 | From 1159393 | to 1159830 | Unknown |
| SEQ ID NO. 1125 | LM-2421.1 | From 2172068 | to 2173591 | glycine betaine transporter |
| | | | | BetL |
| SEQ ID NO. 1126 | LM-2423.1 | From 2173836 | to 2174486 | Unknown, similar to L- |
| | | | | fuculose-phosphate |
| | | | | aldolase |
| SEQ ID NO. 1127 | LM-2424.1 | From 2174488 | to 2175420 | Unknown, similar to 1- |
| | | | | phosphofructokinase |
| SEQ ID NO. 1128 | LM-2426.1 | From 2175438 | to 2176787 | Unknown, similar to PTS |
| | | | | system galactitol-specific |
| | | | | enzyme IIC component |
| SEQ ID NO. 1129 | LM-2428.1 | From 2176815 | to 2177090 | Unknown, similar to PTS |
| | | | | system galactitol-specific |
| | | | | enzyme IIB component |
| SEQ ID NO. 1130 | LM-2429.1 | From 2177096 | to 2177563 | Unknown, similar to PTS |
| | | | | system galactitol-specific |
| | | | | enzyme IIA component |
| SEQ ID NO. 1131 | LM-243.1 | From 1158930 | to 1159403 | Unknown |
| SEQ ID NO. 1132 | LM-2431.1 | From 2177571 | to 2179577 | Unknown, similar to |
| | | | | transcription antiterminator |
| SEQ ID NO. 1133 | LM-2432.2 | From 2179758 | to 2181203 | Unknown, similar to |
| | | | | transcriptional regulator |
| | | | | (GntR family) and to |
| | | | | aminotransferase |
| | | | | (MocR-like) |
| SEQ ID NO. 1134 | LM-2433.2 | From 161420 | to 162250 | Unknown |
| SEQ ID NO. 1135 | LM-2439.1 | From 155993 | to 156805 | Unknwown, conserved |
| | | | | hypothetical protein |
| SEQ ID NO. 1136 | LM-244.1 | From 1158425 | to 1158844 | Unknown |
| SEQ ID NO. 1137 | LM-2441.1 | From 153608 | to 155947 | Unknown, similar to ATP |
| | | | | dependent helicase |
| SEQ ID NO. 1138 | LM-2442.1 | From 152648 | to 153328 | Unknown |
| SEQ ID NO. 1139 | LM-2444.1 | From 151839 | to 152645 | Unknown, similar to high- |
| | | | | affinity zinc ABC transporter |
| | | | | (membrane protein) |
| SEQ ID NO. 1140 | LM-2446.1 | From 151186 | to 151890 | Unknown, similar to high- |
| | | | | affinity zinc ABC transporter |
| | | | | (ATP-binding protein) |
| SEQ ID NO. 1141 | LM-2447.2 | From 150232 | to 151173 | Unknown, similar to a |
| | | | | probable high-affinity zinc |
| | | | | ABC transporter (Zn(II)- |
| | | | | binding lipoprotein) |
| SEQ ID NO. 1142 | LM-2448.2 | From 2635167 | to 2637920 | autolysin, amidase |
| SEQ ID NO. 1143 | LM-245.1 | From 1158020 | to 1158388 | Unknown |
| SEQ ID NO. 1144 | LM-2450.1 | From 2637964 | to 2639562 | unknown, highly similar to |
| | | | | CTP synthases |
| SEQ ID NO. 1145 | LM-2452.1 | From 2639930 | to 2640466 | Unknown, similar to B. subtilis |
| | | | | RNA polymerase |
| | | | | delta subunit |
| SEQ ID NO. 1146 | LM-2453.1 | From 2640832 | to 2642502 | arginyl tRNA synthetase |
| SEQ ID NO. 1147 | LM-2455.1 | From 2642499 | to 2642948 | Unknown |
| SEQ ID NO. 1148 | LM-2456.1 | From 2643026 | to 2643679 | Unknown, conserved |
| | | | | hypothetical protein |
| SEQ ID NO. 1149 | LM-2457.1 | From 2643973 | to 2645295 | Unknown, conserved |
| | | | | hypothetical protein |
| SEQ ID NO. 1150 | LM-2458.1 | From 2645310 | to 2646146 | Unknown |
| SEQ ID NO. 1151 | LM-2459.1 | From 2646686 | to 2647009 | Unknown |
| SEQ ID NO. 1152 | LM-246.1 | From 1157592 | to 1158008 | Unknown |
| SEQ ID NO. 1153 | LM-2460.1 | From 2647164 | to 2648825 | Unknown, similar to |
| | | | | dipeptide ABC transporter |
| | | | | (dipeptide-binding protein) |
| SEQ ID NO. 1154 | LM-2461.1 | From 2648960 | to 2649574 | Unknown |
| SEQ ID NO. 1155 | LM-2462.1 | From 2649598 | to 2650230 | Unknown, similar to |
| | | | | nicotinamidase |
| SEQ ID NO. 1156 | LM-2463.1 | From 2650231 | to 2650755 | Unknown, similar to Chain |
| | | | | A, Dihydrofolate Reductase |
| SEQ ID NO. 1157 | LM-2464.1 | From 2650758 | to 2651756 | Unknown, similar to zinc- |
| | | | | binding dehydrogenase |
| SEQ ID NO. 1158 | LM-2465.1 | From 2651853 | to 2652125 | Unknown |
| SEQ ID NO. 1159 | LM-2467.2 | From 2652174 | to 2653085 | Unknown, similar to cation |
| | | | | transport protein |
| SEQ ID NO. 1160 | LM-2469.1 | From 331543 | to 332688 | Unknown |
| SEQ ID NO. 1161 | LM-247.3 | From 1156384 | to 1157241 | unknown, similar to |
| | | | | methylases |
| SEQ ID NO. 1162 | LM-2470.1 | From 331063 | to 331446 | Unknown |
| SEQ ID NO. 1163 | LM-2473.1 | From 329923 | to 330999 | Unknown, similar to low |
| | | | | specificity L-allo-threonine |
| | | | | aldolase |
| SEQ ID NO. 1164 | LM-2474.1 | From 328701 | to 329966 | Unknown |
| SEQ ID NO. 1165 | LM-2475.1 | From 327941 | to 328495 | Unknown, putaive secreted, |
| | | | | lysin rich protein |
| SEQ ID NO. 1166 | LM-2476.1 | From 327621 | to 327905 | Unknown |
| SEQ ID NO. 1167 | LM-2477.1 | From 327113 | to 327454 | Unknown, similar to PTS |
| | | | | beta-glucoside-specific |
| | | | | enzyme IIA component |
| SEQ ID NO. 1168 | LM-2478.1 | From 325729 | to 327120 | Unknown, similar to |
| | | | | phospho-beta-glucosidase |
| | | | | and phospho-beta- |
| | | | | galactosidase |
| SEQ ID NO. 1169 | LM-2480.1 | From 325422 | to 325712 | Unknown, similar to PTS |
| | | | | beta-glucoside-specific |
| | | | | enzyme IIB component |
| SEQ ID NO. 1170 | LM-2482.1 | From 324104 | to 325417 | Unknown, similar to PTS |
| | | | | beta-glucoside-specific |
| | | | | enzyme IIC component |
| SEQ ID NO. 1171 | LM-2483.1 | From 322134 | to 324005 | Unknown, similar to |
| | | | | transcriptional |
| | | | | antiterminator (BglG family) |
| SEQ ID NO. 1172 | LM-2485.1 | From 321490 | to 322128 | Unknown |
| SEQ ID NO. 1173 | LM-2486.1 | From 320542 | to 321279 | Unknown, similar to FMN- |
| | | | | containing NADPH-linked |
| | | | | nitro/flavin reductase |
| SEQ ID NO. 1174 | LM-2487.1 | From 319560 | to 320423 | Unknown, similar to |
| | | | | transcription regulator LysR- |
| | | | | gltR family |
| SEQ ID NO. 1175 | LM-2488.2 | From 319049 | to 319528 | Unknown, conserved |
| | | | | hypothetical protein, highly |
| | | | | similar to B. subtilis YydA |
| | | | | proteinYyd |
| SEQ ID NO. 1176 | LM-2489.2 | From 2118812 | to 2119786 | Unknown, similar to |
| | | | | phospho-N-acetylmuramoyl- |
| | | | | pentapeptide transferase |
| SEQ ID NO. 1177 | LM-249.2 | From 2788504 | to 2790243 | unknown, highly similar to |
| | | | | ABC transporter (ATP- |
| | | | | binding protein) required for |
| | | | | expression of |
| | | | | cytochrome BD |
| SEQ ID NO. 1178 | LM-2490.1 | From 2117304 | to 2118671 | Unknown, similar to UDP-N- |
| | | | | acetylmuramoylalanine |
| | | | | D-glutamate ligase |
| SEQ ID NO. 1179 | LM-2491.1 | From 2116216 | to 2117307 | Unknown, similar to |
| | | | | peptidoglycan synthesis |
| | | | | enzymes, putative |
| | | | | phospho-N-acetylmuramoyl- |
| | | | | pentapeptide-transferase |
| SEQ ID NO. 1180 | LM-2493.1 | From 2115381 | to 2116193 | Unknown, similar to cell- |
| | | | | division initiation protein |
| | | | | divIB |
| SEQ ID NO. 1181 | LM-2495.1 | From 2113734 | to 2115014 | Unknown, highly similar to |
| | | | | cell-division protein FtsA |
| SEQ ID NO. 1182 | LM-2496.1 | From 2112492 | to 2113667 | Unknown, highly similar to |
| | | | | cell-division initiation protein |
| | | | | FtsZ |
| SEQ ID NO. 1183 | LM-2497.1 | From 2111684 | to 2112373 | Unknown, similar to |
| | | | | unknown proteins |
| SEQ ID NO. 1184 | LM-2499.1 | From 2111222 | to 2111680 | Unknown, similar to |
| | | | | unknown proteins |
| SEQ ID NO. 1185 | LM-25.1 | From 2729457 | to 2729927 | Ribosomal protein S7 |
| SEQ ID NO. 1186 | LM-2500.1 | From 2110909 | to 2111199 | Unknown, similar to |
| | | | | unknown proteins |
| SEQ ID NO. 1187 | LM-2501.1 | From 2110009 | to 2110785 | Unknown, similar to |
| | | | | unknown proteins |
| SEQ ID NO. 1188 | LM-2506.1 | From 2104901 | to 2106001 | Unknown, similar to |
| | | | | quinolinate synthetase |
| SEQ ID NO. 1189 | LM-2507.1 | From 2104059 | to 2104904 | Unknown, similar to |
| | | | | nicotinate-nucleotide |
| | | | | pyrophosphorylase |
| SEQ ID NO. 1190 | LM-2508.2 | From 2102608 | to 2104062 | Unknown, similar to L- |
| | | | | aspartate oxidase |
| SEQ ID NO. 1191 | LM-2509.2 | From 2101371 | to 2102477 | Unknown, similar to a NifS- |
| | | | | like protein required for |
| | | | | NAD biosynthesis |
| SEQ ID NO. 1192 | LM-251.1 | From 2790243 | to 2791967 | Unknown, highly similar to |
| | | | | ABC transporter required for |
| | | | | expression of |
| | | | | cytochrome BD |
| SEQ ID NO. 1193 | LM-2510.2 | From 2034693 | to 2035517 | Unknown, similar to |
| | | | | ferrichrome ABC transporter |
| | | | | (ATP-binding protein) |
| SEQ ID NO. 1194 | LM-2511.1 | From 2035507 | to 2036505 | Unknown, similar to |
| | | | | oxidoreductases |
| SEQ ID NO. 1195 | LM-2512.1 | From 2036521 | to 2037141 | Unknown, similar to |
| | | | | transcription regulators |
| | | | | (TetR family) |
| SEQ ID NO. 1196 | LM-2514.2 | From 2037141 | to 2037956 | Unknown, similar to |
| | | | | unknown proteins |
| SEQ ID NO. 1197 | LM-2515.2 | From 2037953 | to 2038840 | Unknown, similar to ABC |
| | | | | transporter, ATP-binding |
| | | | | protein |
| SEQ ID NO. 1198 | LM-2517.1 | From 2039441 | to 2039998 | Unknown, similar to |
| | | | | unknown proteins |
| SEQ ID NO. 1199 | LM-2518.1 | From 2040274 | to 2040933 | Unknown, similar to |
| | | | | unknown proteins |
| SEQ ID NO. 1200 | LM-252.1 | From 2791967 | to 2792980 | unknown, highly similar to |
| | | | | cytochrome D ubiquinol |
| | | | | oxidase subunit II |
| SEQ ID NO. 1201 | LM-2520.1 | From 2040911 | to 2042110 | Unknown, similar to toxic |
| | | | | ion resistance proteins |
| SEQ ID NO. 1202 | LM-2521.1 | From 2042157 | to 2042900 | unknown, similar to |
| | | | | creatinine amidohydrolases |
| SEQ ID NO. 1203 | LM-2522.1 | From 2042913 | to 2043521 | Unknown, similar to 2-keto- |
| | | | | 3-deoxygluconate-6- |
| | | | | phosphate aldolase |
| SEQ ID NO. 1204 | LM-2523.1 | From 2043540 | to 2044457 | Unknown, similar to putative |
| | | | | phosphotriesterase related |
| | | | | proteins |
| SEQ ID NO. 1205 | LM-2524.1 | From 2044481 | to 2045749 | Unknown, similar to |
| | | | | unknown proteins |
| SEQ ID NO. 1206 | LM-2527.1 | From 2046046 | to 2046489 | Unknown, similar to PTS |
| | | | | system enzyme II A |
| | | | | component |
| SEQ ID NO. 1207 | LM-2528.1 | From 2046507 | to 2047256 | Unknown, similar to |
| | | | | transcription regulators, |
| | | | | (GntR family) |
| SEQ ID NO. 1208 | LM-2529.1 | From 2047444 | to 2048514 | Unknown, similar to E. coli |
| | | | | DNA-damage-inducibile |
| | | | | protein dinP |
| SEQ ID NO. 1209 | LM-2530.1 | From 2048623 | to 2049414 | Unknown, similar to |
| | | | | oxidoreductase |
| SEQ ID NO. 1210 | LM-2531.1 | From 2049419 | to 2050339 | Unknown, similar to |
| | | | | unknown proteins |
| SEQ ID NO. 1211 | LM-2532.4 | From 2050639 | to 2052114 | Unknown, similar to |
| | | | | glucose-6-phosphate |
| | | | | 1-dehydrogenase |
| SEQ ID NO. 1212 | LM-2533.2 | From 1731955 | to 1732893 | Unknown, similar to |
| | | | | menaquinone biosynthesis |
| | | | | proteins |
| SEQ ID NO. 1213 | LM-2536.1 | From 1732926 | to 1734779 | unknown, similar to |
| | | | | 5-methyltetrahydrofolate |
| | | | | homocysteine |
| | | | | methyltransferase (metH) |
| SEQ ID NO. 1214 | LM-2538.1 | From 1734776 | to 1735948 | unknown; similar to |
| | | | | cystathionine beta-lyase |
| SEQ ID NO. 1215 | LM-2539.1 | From 1735941 | to 1737065 | unknown, similar to |
| | | | | cystathionine gamma- |
| | | | | synthase |
| SEQ ID NO. 1216 | LM-254.1 | From 2792967 | to 2794373 | Unknown, highly similar to |
| | | | | cytochrome D ubiquinol |
| | | | | oxidase subunit I |
| SEQ ID NO. 1217 | LM-2540.2 | From 1737087 | to 1739384 | unknown, similar to |
| | | | | cobalamin-independent |
| | | | | methionine synthase |
| SEQ ID NO. 1218 | LM-2542.2 | From 2088797 | to 2091454 | Unknown, similar to putative |
| | | | | sugar hydrolases |
| SEQ ID NO. 1219 | LM-2543.1 | From 2087489 | to 2088793 | Unknown, similar to |
| | | | | unknown proteins |
| SEQ ID NO. 1220 | LM-2544.1 | From 2086817 | to 2087428 | unknown, similar to |
| | | | | unknown proteins |
| SEQ ID NO. 1221 | LM-2545.1 | From 2085021 | to 2086760 | Unknown, similar to two- |
| | | | | component sensor histidine |
| | | | | kinase |
| SEQ ID NO. 1222 | LM-2546.1 | From 2083537 | to 2085021 | Unknown, similar to two- |
| | | | | component response |
| | | | | regulator |
| SEQ ID NO. 1223 | LM-2547.1 | From 2082495 | to 2083424 | Unknown, similar to putative |
| | | | | transport system integral |
| | | | | membrane protein |
| SEQ ID NO. 1224 | LM-2548.1 | From 2081505 | to 2082476 | Unknown, similar to ABC |
| | | | | transporter, permease |
| | | | | protein |
| SEQ ID NO. 1225 | LM-2549.1 | From 2080027 | to 2081484 | Unknown, similar to putative |
| | | | | sugar-binding lipoproteins |
| SEQ ID NO. 1226 | LM-255.1 | From 2794755 | to 2795225 | Unknown, conserved |
| | | | | hypothetical proteins |
| SEQ ID NO. 1227 | LM-2553.1 | From 2078132 | to 2079829 | Unknown, similar to alpha- |
| | | | | acetolactate synthase |
| | | | | protein, AIsS |
| SEQ ID NO. 1228 | LM-2554.3 | From 2077019 | to 2078014 | Unknown, similar to |
| | | | | oxidoreductase |
| SEQ ID NO. 1229 | LM-2557.2 | From 634479 | to 635279 | Unknown, similar to |
| | | | | transport proteins |
| | | | | (formate?) |
| SEQ ID NO. 1230 | LM-2559.2 | From 633709 | to 634251 | Unknown |
| SEQ ID NO. 1231 | LM-2560.1 | From 632811 | to 633581 | Unknown, similar to |
| | | | | unknown membrane |
| | | | | proteins |
| SEQ ID NO. 1232 | LM-2561.1 | From 631045 | to 632811 | Unknown, similar to a fusion |
| | | | | of two types of conserved |
| | | | | hypothetical |
| | | | | proteinconserved |
| | | | | hypothetical |
| SEQ ID NO. 1233 | LM-2562.1 | From 630629 | to 631042 | Unknown |
| SEQ ID NO. 1234 | LM-2563.1 | From 629088 | to 630491 | Unknown, similar to DNA |
| | | | | photolyase |
| SEQ ID NO. 1235 | LM-2565.1 | From 626506 | to 628971 | Unknown, putative secreted |
| | | | | protein |
| SEQ ID NO. 1236 | LM-2566.1 | From 625463 | to 626488 | Unknown |
| SEQ ID NO. 1237 | LM-2567.2 | From 624682 | to 625395 | Unknown, putative secreted |
| | | | | protein |
| SEQ ID NO. 1238 | LM-2568.3 | From 702088 | to 702954 | Unknown, conserved |
| | | | | hypothetical proteins |
| SEQ ID NO. 1239 | LM-2570.1 | From 701247 | to 702062 | Unknown, highly similar to |
| | | | | phosphomethylpyrimidine |
| | | | | kinase thiD |
| SEQ ID NO. 1240 | LM-2571.1 | From 700876 | to 701184 | Unknown, similar to |
| | | | | unknown proteins |
| SEQ ID NO. 1241 | LM-2573.1 | From 700537 | to 700821 | unknown, similar to |
| | | | | transposases |
| SEQ ID NO. 1242 | LM-2574.1 | From 699410 | to 700306 | Unknown, similar to |
| | | | | transcription regulator |
| | | | | (Rgg type) |
| SEQ ID NO. 1243 | LM-2575.1 | From 698785 | to 699420 | Unknown, conserved |
| | | | | hypothetical protein |
| SEQ ID NO. 1244 | LM-2577.1 | From 698317 | to 698733 | Unknown |
| SEQ ID NO. 1245 | LM-2578.1 | From 697634 | to 698197 | Unknown, conserved |
| | | | | hypothetical protein |
| SEQ ID NO. 1246 | LM-2579.1 | From 696883 | to 697590 | Unknown, similar to |
| | | | | phosphoprotein |
| | | | | phosphatases |
| SEQ ID NO. 1247 | LM-258.1 | From 2795420 | to 2796997 | Unknown, similar to |
| | | | | acetate-CoA ligase |
| SEQ ID NO. 1248 | LM-2581.1 | From 695496 | to 696416 | Unknown |
| SEQ ID NO. 1249 | LM-2583.1 | From 694973 | to 695509 | Unknown, similar to |
| | | | | unknown proteins |
| SEQ ID NO. 1250 | LM-2584.1 | From 694317 | to 694964 | Unknown, similar to |
| | | | | transcription regulator |
| SEQ ID NO. 1251 | LM-2587.1 | From 691581 | to 694271 | Unknown, conserved |
| | | | | membrane protein |
| SEQ ID NO. 1252 | LM-2589.1 | From 690897 | to 691538 | Unknown, similar to |
| | | | | transcription regulators |
| SEQ ID NO. 1253 | LM-259.1 | From 2797039 | to 2797758 | Unknown, similar to |
| | | | | glucosamine-6-phosphate |
| | | | | isomerase |
| SEQ ID NO. 1254 | LM-2590.1 | From 689923 | to 690873 | Unknown, similar to |
| | | | | membrane proteins |
| SEQ ID NO. 1255 | LM-2592.1 | From 689541 | to 689825 | Unknown |
| SEQ ID NO. 1256 | LM-2593.1 | From 688619 | to 689458 | Unknown, similar to |
| | | | | unknown proteins |
| SEQ ID NO. 1257 | LM-2594.2 | From 687138 | to 688529 | Unknown, similar to amino |
| | | | | acid transporter |
| SEQ ID NO. 1258 | LM-2597.3 | From 1113759 | to 1115630 | unknown, similar to B. subtilis |
| | | | | minor teichoic acids |
| | | | | biosynthesis protein GgaB |
| SEQ ID NO. 1259 | LM-2598.3 | From 1115647 | to 1116513 | Unknown, similar to |
| | | | | glucose-1-phosphate |
| | | | | thymidyl transferase |
| SEQ ID NO. 1260 | LM-2599.1 | From 1116532 | to 1117092 | Unknown, similar to dTDP- |
| | | | | sugar epimerase |
| SEQ ID NO. 1261 | LM-26.1 | From 2729958 | to 2730371 | ribosomal protein S12 |
| SEQ ID NO. 1262 | LM-260.1 | From 2797838 | to 2798572 | Unknown, similar to merR- |
| | | | | family transcriptional |
| | | | | regulator |
| SEQ ID NO. 1263 | LM-2600.1 | From 1117093 | to 1118079 | Unknown, similar to dTDP- |
| | | | | D-glucose 4,6-dehydratase |
| SEQ ID NO. 1264 | LM-2601.1 | From 1118082 | to 1118912 | unknown, similar to DTDP- |
| | | | | L-rhamnose synthetase |
| SEQ ID NO. 1265 | LM-2602.1 | From 1118992 | to 1121022 | unknown, similar to teichoic |
| | | | | acid biosynthesis protein B |
| SEQ ID NO. 1266 | LM-2603.1 | From 1121098 | to 1121808 | unknown, similar to CDP- |
| | | | | ribitol pyrophosphorylase |
| SEQ ID NO. 1267 | LM-2604.1 | From 1121805 | to 1122830 | unknown, similar to glucitol |
| | | | | dehydrogenase |
| SEQ ID NO. 1268 | LM-2606.1 | From 1122918 | to 1124078 | unknown, similar to teichoic |
| | | | | acid biosynthesis protein B |
| | | | | precursor |
| SEQ ID NO. 1269 | LM-2607.1 | From 1124079 | to 1124462 | unknown, highly similar to |
| | | | | glycerol-3-phosphate |
| | | | | cytidylyltransferase (gct), |
| | | | | CDP-glycerol |
| | | | | pyrophosphorylase (teichoic |
| | | | | acid biosynthesis protein D) |
| SEQ ID NO. 1270 | LM-2608.1 | From 1124484 | to 1125467 | unknown, similar to |
| | | | | glycosyltransferases |
| SEQ ID NO. 1271 | LM-2609.1 | From 1125482 | to 1126495 | unknown, siumilar to |
| | | | | glysosyltransferases |
| SEQ ID NO. 1272 | LM-261.1 | From 2798626 | to 2799087 | Unknown, similar to |
| | | | | unknown proteins |
| SEQ ID NO. 1273 | LM-2611.1 | From 1126704 | to 1128194 | unknown, conserved |
| | | | | hypothetical protein, similar |
| | | | | to B. subtilis YueK protein |
| SEQ ID NO. 1274 | LM-2613.1 | From 1128206 | to 1129030 | unknown, similar to NH(3)- |
| | | | | dependent NAD(+) |
| | | | | synthetases, nitrogen |
| | | | | regulatory protein |
| SEQ ID NO. 1275 | LM-2614.1 | From 1129043 | to 1129351 | Unknown |
| SEQ ID NO. 1276 | LM-2615.1 | From 1129412 | to 1129816 | unknown, similar to PTS |
| | | | | system, cellobiose-specific |
| | | | | IIB component (cel A) |
| SEQ ID NO. 1277 | LM-2616.1 | From 1129945 | to 1131501 | unknown, highly similar to |
| | | | | GMP synthetase |
| SEQ ID NO. 1278 | LM-2618.1 | From 1131558 | to 1132760 | unknown, similar to |
| | | | | integrases |
| SEQ ID NO. 1279 | LM-2619.1 | From 1133698 | to 1134117 | unknown, similar to a |
| | | | | protein encoded by Tn916 |
| SEQ ID NO. 1280 | LM-262.1 | From 2799108 | to 2799551 | Unknown, similar to |
| | | | | unknown proteins |
| SEQ ID NO. 1281 | LM-2621.4 | From 1134472 | to 1136595 | cadmium resistance protein |
| SEQ ID NO. 1282 | LM-2623.2 | From 2119833 | to 2121308 | Unknown, similar to UDP-N- |
| | | | | acetylmuramoylalanyl-D- |
| | | | | glutamate-2,6- |
| | | | | diaminopimelate ligase |
| SEQ ID NO. 1283 | LM-2625.2 | From 2121483 | to 2123738 | Unknown, similar to |
| | | | | penicillin-binding protein 2B |
| SEQ ID NO. 1284 | LM-2626.2 | From 2123735 | to 2124097 | Unknown, similar to cell- |
| | | | | division protein FtsL |
| SEQ ID NO. 1285 | LM-2628.1 | From 2124114 | to 2125052 | Unknown, similar to |
| | | | | unknown proteins |
| SEQ ID NO. 1286 | LM-2629.1 | From 2125065 | to 2125496 | Unknown, similar to |
| | | | | unknown proteins |
| SEQ ID NO. 1287 | LM-263.1 | From 2799609 | to 2800961 | Unknown, conserved |
| | | | | hypothetical proteins |
| SEQ ID NO. 1288 | LM-2631.2 | From 2125699 | to 2126946 | Unknown, similar to integral |
| | | | | membrane proteins |
| SEQ ID NO. 1289 | LM-2632.1 | From 2127062 | to 2128876 | Unknown, similar to |
| | | | | transporter binding proteins |
| SEQ ID NO. 1290 | LM-2633.1 | From 2128806 | to 2129192 | Unknown |
| SEQ ID NO. 1291 | LM-2635.1 | From 2129185 | to 2130078 | Unknown, weakly similar to |
| | | | | ketopantoate reductase |
| | | | | involved in thiamin |
| | | | | biosynthesis |
| SEQ ID NO. 1292 | LM-2637.1 | From 2130492 | to 2131028 | Unknown, similar to |
| | | | | unknown proteins |
| SEQ ID NO. 1293 | LM-2638.1 | From 2131158 | to 2132330 | Unknown, similar to |
| | | | | unknown proteins |
| SEQ ID NO. 1294 | LM-2639.1 | From 2132412 | to 2134652 | Unknown, similar to |
| | | | | excinuclease ABC |
| | | | | (subunit A) |
| SEQ ID NO. 1295 | LM-264.1 | From 2800958 | to 2801407 | Unknown, similar to |
| | | | | transcription regulators |
| SEQ ID NO. 1296 | LM-2641.1 | From 2134695 | to 2135735 | Unknown, weakly similar to |
| | | | | proteases |
| SEQ ID NO. 1297 | LM-2642.1 | From 2135754 | to 2136236 | Unknown, similar to |
| | | | | phosphopantetheine |
| | | | | adenylyltransferase |
| SEQ ID NO. 1298 | LM-2643.1 | From 2136239 | to 2136796 | Unknown, similar to |
| | | | | unknown proteins |
| SEQ ID NO. 1299 | LM-2645.1 | From 2136893 | to 2137174 | Unknown, similar to |
| | | | | unknown proteins |
| SEQ ID NO. 1300 | LM-2647.1 | From 2137205 | to 2137654 | Unknown, similar to |
| | | | | unknown proteins |
| SEQ ID NO. 1301 | LM-2648.1 | From 2137702 | to 2138757 | Unknown, similar to |
| | | | | unknown proteins |
| SEQ ID NO. 1302 | LM-265.1 | From 2801577 | to 2802458 | Unknown, similar to |
| | | | | unknown proteins |
| SEQ ID NO. 1303 | LM-2650.2 | From 2138904 | to 2139809 | unknown, highly similar to |
| | | | | heme A farnesyltransferase |
| SEQ ID NO. 1304 | LM-2651.2 | From 1994751 | to 1995434 | Unknown, similar to |
| | | | | unknown proteins |
| SEQ ID NO. 1305 | LM-2652.1 | From 1995520 | to 1996116 | Unknown, similar to |
| | | | | unknown proteins |
| SEQ ID NO. 1306 | LM-2653.1 | From 1996204 | to 1996749 | Unknown, similar to |
| | | | | unknown proteins |
| SEQ ID NO. 1307 | LM-2654.1 | From 1996784 | to 1998037 | Unknown, similar to |
| | | | | unknown proteins |
| SEQ ID NO. 1308 | LM-2657.1 | From 1998168 | to 1999454 | Unknown, similar to 5- |
| | | | | enolpyruvylshikimate-3- |
| | | | | phosphate synthase |
| SEQ ID NO. 1309 | LM-2659.1 | From 1999468 | to 2000571 | Unknown, similar to |
| | | | | prephenate dehydrogenase |
| SEQ ID NO. 1310 | LM-266.1 | From 2802543 | to 2802998 | Unknown, similar to |
| | | | | transcription regulator MerR |
| | | | | family |
| SEQ ID NO. 1311 | LM-2660.1 | From 2000592 | to 2001674 | Unknown, similar to |
| | | | | histidinol-phosphate |
| | | | | aminotransferase and |
| | | | | tyrosine/phenylalanine |
| | | | | aminotransferase |
| SEQ ID NO. 1312 | LM-2661.1 | From 2001674 | to 2002048 | Unknown, similar to |
| | | | | chorismate mutase |
| SEQ ID NO. 1313 | LM-2662.1 | From 2002045 | to 2003142 | Unknown, similar to |
| | | | | 3-dehydroquinate synthase |
| SEQ ID NO. 1314 | LM-2664.2 | From 2003145 | to 2004311 | Unknown, similar to |
| | | | | chorismate synthase |
| SEQ ID NO. 1315 | LM-267.1 | From 2802998 | to 2803402 | Unknown, similar to |
| | | | | unknown proteins |
| SEQ ID NO. 1316 | LM-2675.4 | From 1748263 | to 1748709 | unknown, similar to |
| | | | | transcription regulators (Fur |
| | | | | family), PerR in B. subtilis |
| SEQ ID NO. 1317 | LM-2676.2 | From 1356769 | to 1357683 | Unknown, highly similar to |
| | | | | tRNA pseudouridine 55 |
| | | | | synthase |
| SEQ ID NO. 1318 | LM-2677.1 | From 1356327 | to 1356671 | Unknown, highly similar to |
| | | | | ribosome-binding factor A |
| SEQ ID NO. 1319 | LM-2679.1 | From 1356032 | to 1356310 | unknown, conserved |
| | | | | hypothetical protein similar |
| | | | | to B. subtilis YlxP protein |
| SEQ ID NO. 1320 | LM-268.1 | From 2803445 | to 2804056 | unknown, similar to |
| | | | | phosphatase |
| SEQ ID NO. 1321 | LM-2683.1 | From 1353696 | to 1356035 | Unknown, highly similar to |
| | | | | translation initiation factor |
| | | | | IF-2 |
| SEQ ID NO. 1322 | LM-2684.1 | From 1353374 | to 1353673 | unknown, conserved |
| | | | | hypothetical protein, similar |
| | | | | to B. subtilis YlxQ protein |
| SEQ ID NO. 1323 | LM-2685.1 | From 1353097 | to 1353381 | unknown, similar to B. subtilis |
| | | | | YlxR protein |
| SEQ ID NO. 1324 | LM-2687.1 | From 1351964 | to 1353082 | unknown, highly similar to N |
| | | | | utilization substance protein |
| | | | | A (NusA protein) |
| SEQ ID NO. 1325 | LM-2689.1 | From 1351467 | to 1351934 | unknown, conserved |
| | | | | hypothetical protein, similar |
| | | | | to B. subtilis YlxS protein |
| SEQ ID NO. 1326 | LM-269.1 | From 2804070 | to 2804438 | unknown, similar to |
| | | | | transcription regulator (RpiR |
| | | | | family) |
| SEQ ID NO. 1327 | LM-2692.1 | From 1346951 | to 1351285 | unknown, highly similar to |
| | | | | DNA polymerase III (alpha |
| | | | | subunit) |
| SEQ ID NO. 1328 | LM-2693.1 | From 1345140 | to 1346846 | prolyl-tRNA synthetase |
| SEQ ID NO. 1329 | LM-2696.2 | From 1343838 | to 1345100 | unknown, conserved |
| | | | | hypothetical protein similar |
| | | | | to B. subtilis YluC protein |
| SEQ ID NO. 1330 | LM-2698.2 | From 1342682 | to 1343824 | Unknown, similar to |
| | | | | deoxyxylulose 5-phosphate |
| | | | | reductoisomerase |
| SEQ ID NO. 1331 | LM-2699.2 | From 1341879 | to 1342667 | unknown, similar to |
| | | | | phosphatidate |
| | | | | cytidylyltransferase (CDP- |
| | | | | diglyceride synthase) |
| SEQ ID NO. 1332 | LM-27.1 | From 2730564 | to 2731961 | Unknown, similar to dGTP |
| | | | | triphosphohydrolase |
| SEQ ID NO. 1333 | LM-270.1 | From 2804522 | to 2805274 | unknown |
| SEQ ID NO. 1334 | LM-2701.3 | From 1779714 | to 1780802 | unknown, similar to putative |
| | | | | outer surface protein |
| SEQ ID NO. 1335 | LM-2702.1 | From 1780824 | to 1781126 | unknown, similar to |
| | | | | phosphotransferase system |
| | | | | (PTS) lichenan-specific |
| | | | | enzyme IIA component |
| SEQ ID NO. 1336 | LM-2703.1 | From 1781196 | to 1781504 | unknown, similar to |
| | | | | phosphotransferase system |
| | | | | (PTS) lichenan-specific |
| | | | | enzyme IIB component |
| SEQ ID NO. 1337 | LM-2705.2 | From 1781661 | to 1784339 | unknown, similar to |
| | | | | transcriptional regulator |
| | | | | (NifA/NtrC family) |
| SEQ ID NO. 1338 | LM-2707.2 | From 1784473 | to 1785798 | unknown, similar to ATP- |
| | | | | dependent RNA helicases |
| SEQ ID NO. 1339 | LM-2708.1 | From 1785841 | to 1786614 | unknown |
| SEQ ID NO. 1340 | LM-2710.1 | From 1786607 | to 1787287 | unknown, similar to ABC |
| | | | | transporter, ATP-binding |
| | | | | protein |
| SEQ ID NO. 1341 | LM-2711.1 | From 1787280 | to 1787648 | unknown, similar to |
| | | | | transcriptional regulator |
| | | | | (GntR family) |
| SEQ ID NO. 1342 | LM-2712.1 | From 1787769 | to 1788752 | unknown, similar to |
| | | | | hypothetical proteins |
| SEQ ID NO. 1343 | LM-2713.1 | From 1788812 | to 1789777 | unknown, similar to |
| | | | | transcription regulators |
| | | | | (Lacl family) |
| SEQ ID NO. 1344 | LM-2714.1 | From 1789825 | to 1793085 | unknown, some similarities |
| | | | | to cellobiose-phosphorylase |
| SEQ ID NO. 1345 | LM-2717.2 | From 1793082 | to 1795253 | unknown, similar to beta- |
| | | | | glucosidases |
| SEQ ID NO. 1346 | LM-2718.2 | From 1561978 | to 1564242 | Unknown, similar to protein- |
| | | | | export membrane protein |
| | | | | SecDF |
| SEQ ID NO. 1347 | LM-272.1 | From 2805440 | to 2807398 | Unknown, similar to PTS |
| | | | | system, fructose-specific |
| | | | | IIABC component |
| SEQ ID NO. 1348 | LM-2720.1 | From 1564343 | to 1564633 | Unknown, similar to |
| | | | | unknown proteins |
| SEQ ID NO. 1349 | LM-2721.1 | From 1564776 | to 1565105 | Unknown, similar to |
| | | | | unknown proteins |
| SEQ ID NO. 1350 | LM-2722.1 | From 1565139 | to 1566278 | Unknown, similar to tRNA- |
| | | | | guanine transglycosylase |
| | | | | Tgt |
| SEQ ID NO. 1351 | LM-2723.1 | From 1566365 | to 1567393 | Unknown, similar to S- |
| | | | | adenosylmethionine: tRNA |
| | | | | ribosyltransferase- |
| | | | | isomerase |
| SEQ ID NO. 1352 | LM-2725.1 | From 1567397 | to 1568404 | unknown, highly similar to |
| | | | | Holliday junction DNA |
| | | | | helicase RuvB |
| SEQ ID NO. 1353 | LM-2726.1 | From 1568420 | to 1569025 | unknown, highly similar to |
| | | | | Holliday junction DNA |
| | | | | helicase (ruvA) |
| SEQ ID NO. 1354 | LM-2728.1 | From 1569149 | to 1570084 | Unknown, similar to L- |
| | | | | lactate dehydrogenase |
| SEQ ID NO. 1355 | LM-2729.1 | From 1570154 | to 1570879 | Unknown, similar to |
| | | | | unknown proteins |
| SEQ ID NO. 1356 | LM-273.1 | From 2807459 | to 2810107 | Unknown, weakly similar to |
| | | | | sugar hydrolase |
| SEQ ID NO. 1357 | LM-2730.1 | From 1570990 | to 1571838 | Unknown, similar to |
| | | | | prephenate dehydratase |
| | | | | PheA |
| SEQ ID NO. 1358 | LM-2732.1 | From 1571905 | to 1573194 | Unknown, conserved GTP |
| | | | | binding protein |
| SEQ ID NO. 1359 | LM-2735.1 | From 1573354 | to 1574847 | Unknown, similar to glycerol |
| | | | | kinase |
| SEQ ID NO. 1360 | LM-2736.2 | From 1574922 | to 1575740 | Unknown, similar to glycerol |
| | | | | uptake facilitator |
| SEQ ID NO. 1361 | LM-2737.2 | From 623251 | to 624423 | Unknown, conserved |
| | | | | hypothetical membrane |
| | | | | protein |
| SEQ ID NO. 1362 | LM-274.1 | From 2810109 | to 2811791 | Unknown, similar to |
| | | | | Sucrose phosphorylase |
| SEQ ID NO. 1363 | LM-2741.1 | From 620805 | to 623135 | Unknown, similar to |
| | | | | preprotein translocase SecA |
| | | | | subunit |
| SEQ ID NO. 1364 | LM-2743.3 | From 618932 | to 620380 | P60 extracellular protein, |
| | | | | invasion associated protein |
| | | | | lap |
| SEQ ID NO. 1365 | LM-2746.1 | From 617660 | to 618844 | Unknown, conserved |
| | | | | hypothetical protein |
| SEQ ID NO. 1366 | LM-2747.1 | From 616973 | to 617629 | Unknown, weakly similar to |
| | | | | carboxylesterase |
| SEQ ID NO. 1367 | LM-275.1 | From 2811788 | to 2812921 | Unknown, conserved |
| | | | | hypothetical protein |
| SEQ ID NO. 1368 | LM-2752.1 | From 615825 | to 616577 | Unknown, putative |
| | | | | conserved membrane |
| | | | | protein |
| SEQ ID NO. 1369 | LM-2753.1 | From 615353 | to 615811 | Unknown |
| SEQ ID NO. 1370 | LM-2754.1 | From 613836 | to 615299 | Unknown |
| SEQ ID NO. 1371 | LM-2755.2 | From 612678 | to 613406 | Unknown, similar to |
| | | | | transcription regulator GntR |
| | | | | family |
| SEQ ID NO. 1372 | LM-2758.2 | From 2343858 | to 2345150 | Unknown, similar to |
| | | | | unknown proteins |
| SEQ ID NO. 1373 | LM-2759.1 | From 2345260 | to 2345526 | Unknown |
| SEQ ID NO. 1374 | LM-276.1 | From 2812925 | to 2813881 | Unknown, similar to |
| | | | | transcriptional regulator |
| | | | | (Lacl family) |
| SEQ ID NO. 1375 | LM-2760.1 | From 2345567 | to 2346088 | Unknown, similar to |
| | | | | unknown proteins |
| SEQ ID NO. 1376 | LM-2761.1 | From 2346252 | to 2346596 | Unknown, hypothetical CDS |
| SEQ ID NO. 1377 | LM-2762.1 | From 2346935 | to 2347285 | unknown, similar to |
| | | | | phosphotransferase system |
| | | | | (PTS) beta-glucoside- |
| | | | | specific enzyme IIA |
| SEQ ID NO. 1378 | LM-2763.1 | From 2347276 | to 2348151 | Unknown, similar to |
| | | | | unknown proteins |
| SEQ ID NO. 1379 | LM-2764.1 | From 2348231 | to 2348539 | Unknown, similar to |
| | | | | unknown proteins |
| SEQ ID NO. 1380 | LM-2765.1 | From 2348604 | to 2349356 | Unknown, similar to |
| | | | | unknown proteins |
| SEQ ID NO. 1381 | LM-2766.1 | From 2349475 | to 2350320 | unknown, similar to unknown |
| | | | | proteins |
| SEQ ID NO. 1382 | LM-2768.1 | From 2350398 | to 2351300 | Unknown, similar to |
| | | | | unknown proteins |
| SEQ ID NO. 1383 | LM-2769.1 | From 2351384 | to 2351746 | Unknown, similar to |
| | | | | unknown proteins |
| SEQ ID NO. 1384 | LM-2770.1 | From 2351767 | to 2352615 | Unknown, similar to |
| | | | | unknown proteins |
| SEQ ID NO. 1385 | LM-2771.1 | From 2352616 | to 2356323 | Unknown, similar to ATP- |
| | | | | dependent |
| | | | | deoxyribonuclease |
| | | | | (subunit A) |
| SEQ ID NO. 1386 | LM-2772.3 | From 2356325 | to 2359798 | Unknown, similar to ATP- |
| | | | | dependent |
| | | | | deoxyribonuclease |
| | | | | (subunit B) |
| SEQ ID NO. 1387 | LM-2774.2 | From 2097176 | to 2099941 | isoleucyl-tRNA synthetase |
| SEQ ID NO. 1388 | LM-2776.1 | From 2096075 | to 2097064 | Unknown, similar to |
| | | | | diaminopimelate epimerase |
| SEQ ID NO. 1389 | LM-2778.1 | From 2095366 | to 2096061 | Unknown, similar to |
| | | | | unknown proteins |
| SEQ ID NO. 1390 | LM-278.1 | From 2813949 | to 2815283 | Unknown, conserved |
| | | | | hypothetical protein similar |
| | | | | to hypothetical hemolysin |
| SEQ ID NO. 1391 | LM-2780.2 | From 2091698 | to 2094808 | Unknown, similar to alpha- |
| | | | | mannosidase |
| SEQ ID NO. 1392 | LM-2781.3 | From 2504300 | to 2505157 | Unknown, similar to |
| | | | | transcription antiterminator |
| SEQ ID NO. 1393 | LM-2782.1 | From 2503931 | to 2504236 | Unknown, similar to B. subtilis |
| | | | | YfhL protein |
| SEQ ID NO. 1394 | LM-2784.1 | From 2502401 | to 2503804 | unknown, highly similar to |
| | | | | glutamate decarboxylases |
| SEQ ID NO. 1395 | LM-2785.1 | From 2501603 | to 2502361 | Unknown, similar to |
| | | | | acetylesterase |
| SEQ ID NO. 1396 | LM-2788.1 | From 2500179 | to 2501150 | Unknown, similar to B. subtilis |
| | | | | ferrichrome ABC |
| | | | | transporter fhuD precursor |
| | | | | (ferrichrome-binding |
| | | | | protein) |
| SEQ ID NO. 1397 | LM-2790.1 | From 2499169 | to 2500179 | Unknown, similarto B. subtilis |
| | | | | ferrichrome ABC |
| | | | | transporter (permease) |
| | | | | FhuG |
| SEQ ID NO. 1398 | LM-2792.1 | From 2498381 | to 2499172 | Unknown, similar to B. subtilis |
| | | | | ferrichrome ABC |
| | | | | transporter (ATP-binding |
| | | | | protein) FhuC |
| SEQ ID NO. 1399 | LM-2793.1 | From 2497069 | to 2498238 | Unknown, similar to cell |
| | | | | division proteins RodA, |
| | | | | FtsW |
| SEQ ID NO. 1400 | LM-2794.1 | From 2495818 | to 2496993 | Unknown, similar to cell |
| | | | | division proteins RodA, |
| | | | | FtsW |
| SEQ ID NO. 1401 | LM-2795.2 | From 2495309 | to 2495662 | Unknown, conserved |
| | | | | hypothetical proteins |
| SEQ ID NO. 1402 | LM-2796.1 | From 1674961 | to 1676325 | unknown, highly similar to |
| | | | | anthranilate synthase alpha |
| | | | | subunit |
| SEQ ID NO. 1403 | LM-2797.1 | From 1674359 | to 1674964 | unknown, highly similar to |
| | | | | anthranilate synthase beta |
| | | | | subunit |
| SEQ ID NO. 1404 | LM-2798.1 | From 1673368 | to 1674387 | unknown, highly similar to |
| | | | | anthranilate |
| | | | | phosphoribosyltransferase |
| SEQ ID NO. 1405 | LM-2799.1 | From 1672613 | to 1673371 | unknown, highly similar to |
| | | | | indol-3-glycerol phosphate |
| | | | | synthases |
| SEQ ID NO. 1406 | LM-28.1 | From 2731976 | to 2732455 | Unknown, similar to |
| | | | | spermidine/spermine N1- |
| | | | | acetyl transferase |
| SEQ ID NO. 1407 | LM-280.1 | From 2815401 | to 2816090 | unknown, similar to |
| | | | | regulatory proteins of the |
| | | | | SIR2 family |
| SEQ ID NO. 1408 | LM-2801.1 | From 1672008 | to 1672616 | phosphoribosyl anthranilate |
| | | | | isomerase |
| SEQ ID NO. 1409 | LM-2804.1 | From 1670803 | to 1672005 | unknown, highly similar to |
| | | | | tryptophan synthase (beta |
| | | | | subunit) |
| SEQ ID NO. 1410 | LM-2805.1 | From 1670037 | to 1670810 | unknown, highly similar to |
| | | | | tryptophan synthase (alpha |
| | | | | subunit) |
| SEQ ID NO. 1411 | LM-2806.1 | From 1669529 | to 1669966 | Unknown |
| SEQ ID NO. 1412 | LM-2808.1 | From 1667831 | to 1669444 | Unknown, similar to putative |
| | | | | transporters |
| SEQ ID NO. 1413 | LM-2809.1 | From 1666107 | to 1667720 | Unknown, similar to putative |
| | | | | transporters |
| SEQ ID NO. 1414 | LM-.2810.1 | From 1665444 | to 1666097 | Unknown, similar to |
| | | | | unknown proteins |
| SEQ ID NO. 1415 | LM-2811.2 | From 1664575 | to 1665405 | Unknown, similar to |
| | | | | unknown proteins |
| SEQ ID NO. 1416 | LM-2812.2 | From 49585 | to 49878 | 30S ribosomal protein S6 |
| SEQ ID NO. 1417 | LM-2813.2 | From 49934 | to 50470 | unknown, highly similar to |
| | | | | single-strand binding protein |
| | | | | (SSB) |
| SEQ ID NO. 1418 | LM-2816.1 | From 50907 | to 51518 | Unknown |
| SEQ ID NO. 1419 | LM-2817.1 | From 51775 | to 52389 | Unknown, similar to |
| | | | | Staphylococcus AgrB |
| | | | | protein |
| SEQ ID NO. 1420 | LM-2818.1 | From 52630 | to 53925 | Unknown, similar to sensor |
| | | | | histidine kinase (AgrC from |
| | | | | Staphylococcus) |
| SEQ ID NO. 1421 | LM-2819.1 | From 53944 | to 54672 | Unknown, similar to 2- |
| | | | | components response |
| | | | | regulator protein (AgrA from |
| | | | | Staphylococcus) |
| SEQ ID NO. 1422 | LM-282.1 | From 2816083 | to 2816373 | Unknown |
| SEQ ID NO. 1423 | LM-2820.1 | From 54839 | to 56812 | Unknown, highly similar to |
| | | | | B. subtilis YybT protein |
| SEQ ID NO. 1424 | LM-2822.1 | From 56815 | to 57261 | 50S ribosomal protein L9 |
| SEQ ID NO. 1425 | LM-2823.2 | From 57286 | to 58638 | unknown, highly similar to |
| | | | | replicative DNA helicases |
| SEQ ID NO. 1426 | LM-2826.1 | From 2580470 | to 2581780 | Unknown, similar to cell wall |
| | | | | binding proteins |
| SEQ ID NO. 1427 | LM-2827.1 | From 2581900 | to 2583105 | peptidoglycan lytic protein |
| | | | | P45 |
| SEQ ID NO. 1428 | LM-2829.1 | From 2583181 | to 2584065 | unknown, highly similar to |
| | | | | cell-division protein FtsX |
| SEQ ID NO. 1429 | LM-283.1 | From 2816363 | to 2817571 | Unknown, similar to drug- |
| | | | | efflux transporters |
| SEQ ID NO. 1430 | LM-2831.1 | From 2584055 | to 2584741 | unknown, highly similar to |
| | | | | the cell-division ATP- |
| | | | | binding protein FtsE |
| SEQ ID NO. 1431 | LM-2832.1 | From 2585245 | to 2586108 | Unknown, similar to |
| | | | | conserved hypothetical |
| | | | | proteins |
| SEQ ID NO. 1432 | LM-2833.1 | From 2586114 | to 2587097 | unknown, highly similar to |
| | | | | peptide chain release |
| | | | | factor 2 |
| SEQ ID NO. 1433 | LM-2834.2 | From 2587300 | to 2589813 | translocase binding subunit |
| | | | | (ATPase) |
| SEQ ID NO. 1434 | LM-2835.2 | From 1052509 | to 1053429 | Unknown |
| SEQ ID NO. 1435 | LM-2836.1 | From 1051695 | to 1052354 | unknown, similar to a |
| | | | | bacterial K(+)-uptake |
| | | | | system |
| SEQ ID NO. 1436 | LM-2838.1 | From 1051038 | to 1051676 | unknown, similar to two- |
| | | | | component response |
| | | | | regulator, in particular B. subtilis |
| | | | | YvqC protein |
| SEQ ID NO. 1437 | LM-2839.1 | From 1049983 | to 1051041 | unknown, similar to two- |
| | | | | component sensor histidine |
| | | | | kinase in particular B. subtilis |
| | | | | YvqE protein |
| SEQ ID NO. 1438 | LM-284.1 | From 2817688 | to 2818035 | Unknown |
| SEQ ID NO. 1439 | LM-2840.1 | From 1049273 | to 1049986 | unknown, similar to B. subtilis |
| | | | | YvqF protein |
| SEQ ID NO. 1440 | LM-2842.1 | From 1048266 | to 1049138 | unknown, similar to B. subtilis |
| | | | | YitL protein |
| SEQ ID NO. 1441 | LM-2843.1 | From 1047490 | to 1048185 | unknown, similar to E. coli |
| | | | | copper homeostasis protein |
| | | | | CutC |
| SEQ ID NO. 1442 | LM-2845.1 | From 1046886 | to 1047377 | unknown, similar to |
| | | | | phosphotransferase system |
| | | | | glucose-specific enzyme IIA |
| SEQ ID NO. 1443 | LM-2846.1 | From 1045869 | to 1046771 | unknown, highly similar to |
| | | | | glycine betaine ABC |
| | | | | transporters (glycine |
| | | | | betaine-binding protein) |
| SEQ ID NO. 1444 | LM-2847.1 | From 1045007 | to 1045855 | unknown, highly similar to |
| | | | | glycine betaine ABC |
| | | | | transporters (permease) |
| SEQ ID NO. 1445 | LM-285.1 | From 2818054 | to 2818698 | Unknown, similar to |
| | | | | transaldolase |
| SEQ ID NO. 1446 | LM-2851.1 | From 1043821 | to 1045014 | unknown, highly similar to |
| | | | | glycine betaine ABC |
| | | | | transporter (ATP-binding |
| | | | | protein) |
| SEQ ID NO. 1447 | LM-2853.1 | From 1042605 | to 1043450 | unknown, similar to |
| | | | | conserved hypothetical |
| | | | | proteins like to B. subtilis |
| | | | | YkuT protein |
| SEQ ID NO. 1448 | LM-2854.1 | From 1041446 | to 1042561 | unknown, similar to N-acyl |
| | | | | L-amino acid |
| | | | | amidohydrolases |
| SEQ ID NO. 1449 | LM-2856.1 | From 1040672 | to 1041382 | unknown, similar to |
| | | | | tetrahydrodipicolinate |
| | | | | succinylase |
| SEQ ID NO. 1450 | LM-2857.1 | From 1039746 | to 1040624 | unknown, similar to |
| | | | | transcription regulator (LysR |
| | | | | family). |
| SEQ ID NO. 1451 | LM-2858.1 | From 1039297 | to 1039749 | unknown, similar to B. subtilis |
| | | | | YkuL protein |
| SEQ ID NO. 1452 | LM-2859.2 | From 1038863 | to 1039096 | unknown, similar to B. subtilis |
| | | | | YkuJ protein |
| SEQ ID NO. 1453 | LM-286.1 | From 2818841 | to 2819530 | Unknown, weakly similar to |
| | | | | transcription regulators |
| | | | | CRP/FNR family |
| SEQ ID NO. 1454 | LM-2860.1 | From 600837 | to 601148 | Unknown, similar to |
| | | | | phosphorybosil-AMP- |
| | | | | cyclohydrolase (HisI2 |
| | | | | protein) |
| SEQ ID NO. 1455 | LM-2861.1 | From 601149 | to 601466 | Unknown, similar to |
| | | | | phosphoribosyl-AMP |
| | | | | cyclohydrolase (HisI1 |
| | | | | protein) |
| SEQ ID NO. 1456 | LM-2863.1 | From 601463 | to 602218 | unknown, highly similar to |
| | | | | cyclase HisF |
| SEQ ID NO. 1457 | LM-2864.1 | From 602208 | to 602930 | unknown, highly similar to |
| | | | | phosphoribosylformimino-5- |
| | | | | aminoimidazole |
| | | | | carboxamide ribotide |
| | | | | isomerase |
| SEQ ID NO. 1458 | LM-2866.1 | From 602909 | to 603535 | unknown, similar to |
| | | | | amidotransferases |
| SEQ ID NO. 1459 | LM-2867.1 | From 603536 | to 604120 | Imidazoleglycerol- |
| | | | | phosphate dehydratase |
| SEQ ID NO. 1460 | LM-2868.1 | From 604121 | to 605404 | unknown, highly similar to |
| | | | | histidinol dehydrogenases |
| SEQ ID NO. 1461 | LM-287.1 | From 2819860 | to 2821587 | Unknown, similar to ABC |
| | | | | transporter (ATP-binding |
| | | | | protein) |
| SEQ ID NO. 1462 | LM-2870.1 | From 605401 | to 606042 | Unknown, similar to ATP |
| | | | | phosphoribosyltransferase |
| SEQ ID NO. 1463 | LM-2871.2 | From 606039 | to 607220 | histidyl-tRNA synthetase |
| SEQ ID NO. 1464 | LM-2872.2 | From 1645958 | to 1646413 | Unknown, similar to |
| | | | | unknown proteins |
| SEQ ID NO. 1465 | LM-2873.3 | From 1646669 | to 1647781 | Unknown, similar to |
| | | | | aminopeptidase |
| SEQ ID NO. 1466 | LM-2875.1 | From 1647821 | to 1648366 | Unknown, similar to 2-cys |
| | | | | peroxiredoxin |
| SEQ ID NO. 1467 | LM-2877.1 | From 1648511 | to 1649854 | unknown, similar to UDP-N- |
| | | | | acetyl muramate-alanine |
| | | | | ligases |
| SEQ ID NO. 1468 | LM-2878.2 | From 1650149 | to 1652500 | Unknown, similar to DNA |
| | | | | translocase |
| SEQ ID NO. 1469 | LM-288.1 | From 2821641 | to 2821892 | Unknown |
| SEQ ID NO. 1470 | LM-2880.1 | From 1652810 | to 1653427 | Unknown, similar |
| | | | | phenylalanyl-tRNA |
| | | | | synthetase (beta subunit) |
| SEQ ID NO. 1471 | LM-2881.1 | From 1653433 | to 1654233 | Unknown, similar to |
| | | | | unknown proteins |
| SEQ ID NO. 1472 | LM-2882.1 | From 1654268 | to 1654579 | Unknown, similar to |
| | | | | thioredoxin |
| SEQ ID NO. 1473 | LM-2883.1 | From 1654902 | to 1655975 | Unknown, similar to |
| | | | | aminopeptidase |
| SEQ ID NO. 1474 | LM-2884.1 | From 1656173 | to 1656484 | Unknown, similar to |
| | | | | unknown proteins |
| SEQ ID NO. 1475 | LM-2885.1 | From 1656521 | to 1656769 | Unknown, similar to |
| | | | | unknown proteins |
| SEQ ID NO. 1476 | LM-2886.1 | From 1656903 | to 1657754 | Unknown, similar to |
| | | | | unknown proteins |
| SEQ ID NO. 1477 | LM-2887.2 | From 1657815 | to 1658459 | Unknown, similar to |
| | | | | unknown proteins |
| SEQ ID NO. 1478 | LM-2889.2 | From 1658466 | to 1659248 | Unknown, similar to |
| | | | | unknown proteins |
| SEQ ID NO. 1479 | LM-289.1 | From 2821912 | to 2823195 | seryl-trna synthetase |
| SEQ ID NO. 1480 | LM-2890.2 | From 1307009 | to 1307605 | unknown, conserved |
| | | | | hypothetical protein, similar |
| | | | | to B. subtilis YneS protein |
| SEQ ID NO. 1481 | LM-2892.1 | From 1306095 | to 1306967 | Unknown, similar to |
| | | | | Lactococcus lactis LacX |
| | | | | protein |
| SEQ ID NO. 1482 | LM-2894.1 | From 1305781 | to 1306092 | Unknown, similar to B. subtilis |
| | | | | YneQ protein |
| SEQ ID NO. 1483 | LM-2895.1 | From 1305390 | to 1305758 | Unknown, similar to B. subtilis |
| | | | | YneP protein |
| SEQ ID NO. 1484 | LM-2898.1 | From 1304457 | to 1305236 | unknown, highly similar to |
| | | | | B. subtilis CodY protein |
| SEQ ID NO. 1485 | LM-29.1 | From 2732589 | to 2733233 | Unknown, similar to |
| | | | | ribulose-phosphate 3- |
| | | | | epimerase |
| SEQ ID NO. 1486 | LM-290.1 | From 2823530 | to 2823949 | Unknown, similar to B. subtilis |
| | | | | stress protein YdaG |
| SEQ ID NO. 1487 | LM-2900.1 | From 1303027 | to 1304436 | unknown, highly similar to |
| | | | | ATP-dependent Clp |
| | | | | protease-like proteins |
| SEQ ID NO. 1488 | LM-2901.1 | From 1302474 | to 1303013 | unknown, highly similar to |
| | | | | beta-type subunit of the 20S |
| | | | | proteasome |
| SEQ ID NO. 1489 | LM-2902.2 | From 1301551 | to 1302453 | unknown, similar to |
| | | | | integrase/recombinase |
| SEQ ID NO. 1490 | LM-2903.2 | From 1299964 | to 1301268 | unknown, similar glucose |
| | | | | inhibited division protein A |
| SEQ ID NO. 1491 | LM-2907.2 | From 1297823 | to 1299901 | unknown, highly similar to |
| | | | | DNA topoisomerase I TopA |
| SEQ ID NO. 1492 | LM-2908.2 | From 1296691 | to 1297551 | Unknown, similar to |
| | | | | polypeptide deformylase, |
| | | | | similar to B. subtilis Smf |
| | | | | protein |
| SEQ ID NO. 1493 | LM-2909.1 | From 1295772 | to 1296557 | unknown, similar to |
| | | | | ribonuclease H rnh |
| SEQ ID NO. 1494 | LM-291.1 | From 2824079 | to 2824651 | Unknown, similar to |
| | | | | glutamine amidotransferase |
| SEQ ID NO. 1495 | LM-2910.1 | From 1294912 | to 1295775 | unknown, conserved |
| | | | | hypothetical protein similar |
| | | | | to B. subtilis YlqF protein |
| SEQ ID NO. 1496 | LM-2911.1 | From 1294360 | to 1294902 | Unknown, similar to signal |
| | | | | peptidase I |
| SEQ ID NO. 1497 | LM-2912.2 | From 1293689 | to 1294258 | Unknown, similar to signal |
| | | | | peptidase I |
| SEQ ID NO. 1498 | LM-2914.2 | From 1498096 | to 1500252 | Unknown, similar to |
| | | | | unknown proteins |
| SEQ ID NO. 1499 | LM-2915.1 | From 1500268 | to 1501227 | Unknown, similar to |
| | | | | phosphate starvation |
| | | | | induced protein PhoH |
| SEQ ID NO. 1500 | LM-2916.1 | From 1501415 | to 1501861 | Unknown, similar to |
| | | | | unknown proteins |
| SEQ ID NO. 1501 | LM-2917.1 | From 1502252 | to 1503019 | Unknown, similar to |
| | | | | unknown proteins |
| SEQ ID NO. 1502 | LM-2918.1 | From 1503020 | to 1503964 | Unknown, similar to |
| | | | | ribosomal protein L11 |
| | | | | methyltransferase |
| SEQ ID NO. 1503 | LM-292.1 | From 2824648 | to 2826354 | Unknown, similar to para- |
| | | | | aminobenzoate synthase |
| | | | | component I |
| SEQ ID NO. 1504 | LM-2921.1 | From 1504037 | to 1505170 | heat shock protein DnaJ |
| SEQ ID NO. 1505 | LM-2922.1 | From 1505312 | to 1507153 | class I heat-shock protein |
| | | | | (molecular chaperone) |
| | | | | DnaK |
| SEQ ID NO. 1506 | LM-2924.1 | From 1507187 | to 1507762 | heat shock protein GrpE |
| SEQ ID NO. 1507 | LM-2925.1 | From 1507804 | to 1508841 | transcription repressor of |
| | | | | class I heat-shock gene |
| | | | | HrcA |
| SEQ ID NO. 1508 | LM-2926.1 | From 1508988 | to 1510145 | unknown, highly similar to |
| | | | | coproporphyrinogen III |
| | | | | oxidase |
| SEQ ID NO. 1509 | LM-2928.1 | From 1510234 | to 1511262 | Unknown, similar to |
| | | | | oxidoreductase |
| SEQ ID NO. 1510 | LM-2929.1 | From 1511375 | to 1511812 | Unknown, similar to |
| | | | | transcriptional regulator |
| | | | | (MerR family) |
| SEQ ID NO. 1511 | LM-2931.3 | From 1511858 | to 1513684 | unknown, highly similar to |
| | | | | GTP-binding protein LepA |
| SEQ ID NO. 1512 | LM-2932.2 | From 2535342 | to 2536268 | Unknown, similar to |
| | | | | dipeptidases |
| SEQ ID NO. 1513 | LM-2933.1 | From 2533840 | to 2535183 | RNA polymerase sigma-54 |
| | | | | factor (sigma-L) |
| SEQ ID NO. 1514 | LM-2935.1 | From 2532352 | to 2533398 | Unknown, similar to B. subtilis |
| | | | | CggR hypothetical |
| | | | | transcriptional regulator |
| SEQ ID NO. 1515 | LM-2936.1 | From 2531310 | to 2532320 | unknown, highly similar to |
| | | | | glyceraldehyde 3-phosphate |
| | | | | dehydrogenase |
| SEQ ID NO. 1516 | LM-2937.1 | From 2529985 | to 2531175 | unknown, highly similar to |
| | | | | phosphoglycerate kinase |
| SEQ ID NO. 1517 | LM-2939.1 | From 2529184 | to 2529939 | unknown, highly similar to |
| | | | | triose phosphate isomerase |
| SEQ ID NO. 1518 | LM-294.1 | From 2826515 | to 2828236 | Unknown, similar to ABC |
| | | | | transporter, ATP-binding |
| | | | | protein |
| SEQ ID NO. 1519 | LM-2942.1 | From 2527650 | to 2529182 | unknown, highly similar to |
| | | | | phosphoglycerate mutase |
| SEQ ID NO. 1520 | LM-2944.2 | From 2526222 | to 2527514 | unknown, highly similar to |
| | | | | enolase |
| SEQ ID NO. 1521 | LM-2945.1 | From 2525946 | to 2526119 | Unknown |
| SEQ ID NO. 1522 | LM-2946.2 | From 2525094 | to 2525813 | Unknown, similar to lipolytic |
| | | | | enzyme |
| SEQ ID NO. 1523 | LM-2950.2 | From 316873 | to 318375 | Unknown, similar to heat- |
| | | | | shock protein htrA serine |
| | | | | protease |
| SEQ ID NO. 1524 | LM-2952.1 | From 315945 | to 316775 | Unknown, conserved |
| | | | | hypothetical protein similar |
| | | | | to B. subtilis YycJ protein |
| SEQ ID NO. 1525 | LM-2953.1 | From 314984 | to 315823 | Unknown, similar to B. subtilis |
| | | | | Yycl protein |
| SEQ ID NO. 1526 | LM-2954.1 | From 313659 | to 314981 | Unknown, similar to B. subtilis |
| | | | | YycH protein |
| SEQ ID NO. 1527 | LM-2957.1 | From 311830 | to 313662 | Unknown, similar to two- |
| | | | | component sensor histidine |
| | | | | kinase |
| SEQ ID NO. 1528 | LM-2958.1 | From 310932 | to 311645 | Unknown, similar to two- |
| | | | | component response |
| | | | | regulator |
| SEQ ID NO. 1529 | LM-2959.2 | From 309538 | to 310719 | Unknown, similar to |
| | | | | aminotransferase |
| SEQ ID NO. 1530 | LM-296.1 | From 2828236 | to 2830008 | Unknown, similar to ABC |
| | | | | transporter, ATP-binding |
| | | | | protein |
| SEQ ID NO. 1531 | LM-2960.3 | From 2692097 | to 2693041 | unknown, highly similar to |
| | | | | RNA polymerase (alpha |
| | | | | subunit) |
| SEQ ID NO. 1532 | LM-2962.2 | From 2693151 | to 2693540 | ribosomal protein S11 |
| SEQ ID NO. 1533 | LM-2964.2 | From 2693563 | to 2693928 | ribosomal protein S13 |
| SEQ ID NO. 1534 | LM-2965.1 | From 2694164 | to 2694382 | unknown, highly similar to |
| | | | | initiation factor IF-I |
| SEQ ID NO. 1535 | LM-2967.1 | From 2694769 | to 2695416 | unknown, highly similar to |
| | | | | adenylate kinases |
| SEQ ID NO. 1536 | LM-2968.1 | From 2695476 | to 2696771 | unknown, highly similar to |
| | | | | preprotein translocase |
| | | | | subunit |
| SEQ ID NO. 1537 | LM-297.1 | From 2830284 | to 2830523 | Unknown |
| SEQ ID NO. 1538 | LM-2970.1 | From 2696771 | to 2697211 | ribosomal protein L15 |
| SEQ ID NO. 1539 | LM-2972.1 | From 2697463 | to 2697966 | ribosomal protein S5 |
| SEQ ID NO. 1540 | LM-2973.1 | From 2697988 | to 2698347 | ribosomal protein L18 |
| SEQ ID NO. 1541 | LM-2974.1 | From 2698387 | to 2698923 | ribosomal protein L6 |
| SEQ ID NO. 1542 | LM-2975.1 | From 2698954 | to 2699352 | ribosomal protein S8 |
| SEQ ID NO. 1543 | LM-2977.1 | From 2699600 | to 2700139 | ribosomal protein L5 |
| SEQ ID NO. 1544 | LM-2979.1 | From 2700166 | to 2700477 | ribosomal protein L24 |
| SEQ ID NO. 1545 | LM-298.1 | From 2830542 | to 2831879 | Unknown, similar to D- |
| | | | | alanyl-D-alanine |
| | | | | carboxypeptidase |
| | | | | (penicillin-binding protein 5) |
| SEQ ID NO. 1546 | LM-2981.1 | From 2700515 | to 2700883 | ribosomal protein L14 |
| SEQ ID NO. 1547 | LM-2983.1 | From 2701435 | to 2701869 | ribosomal protein L16 |
| SEQ ID NO. 1548 | LM-2984.1 | From 2701872 | to 2702528 | ribosomal protein S3 |
| SEQ ID NO. 1549 | LM-2985.2 | From 2702532 | to 2702888 | ribosomal protein L22 |
| SEQ ID NO. 1550 | LM-2986.2 | From 2702909 | to 2703187 | ribosomal protein S19 |
| SEQ ID NO. 1551 | LM-2990.2 | From 1593100 | to 1594407 | unknown, highly similar to |
| | | | | glutamyl-tRNA reductase |
| SEQ ID NO. 1552 | LM-2991.1 | From 1592167 | to 1593096 | unknown, highly similar to |
| | | | | porphobilinogen |
| | | | | deaminases |
| | | | | (hydroxymethylbilane |
| | | | | synthase) |
| SEQ ID NO. 1553 | LM-2992.1 | From 1591448 | to 1592170 | Unknown, similar to |
| | | | | uroporphyrinogen III |
| | | | | cosynthase (HemD) |
| SEQ ID NO. 1554 | LM-2993.1 | From 1590477 | to 1591451 | unknown, highly similar to |
| | | | | delta-aminolevulinic acid |
| | | | | dehydratases |
| | | | | (porphobilinogen synthase) |
| SEQ ID NO. 1555 | LM-2995.1 | From 1589175 | to 1590464 | unknown, highly similar to |
| | | | | glutamate-1-semialdehyde |
| | | | | 2,1-aminotransferases |
| SEQ ID NO. 1556 | LM-2997.1 | From 1586201 | to 1588852 | valyl-tRNA synthetase |
| SEQ ID NO. 1557 | LM-2999.2 | From 1584850 | to 1586139 | unknown, similar to Folyl- |
| | | | | polyglutamate synthetase |
| SEQ ID NO. 1558 | LM-3.1 | From 2712931 | to 2713365 | Unknown |
| SEQ ID NO. 1559 | LM-3000.1 | From 1583928 | to 1584638 | Unknown, similar to B. subtilis |
| | | | | late competence |
| | | | | protein ComC (type IV |
| | | | | prepilin peptidase) |
| SEQ ID NO. 1560 | LM-3001.1 | From 1583242 | to 1583916 | Unknown, similar to DNA |
| | | | | repair protein RadC |
| SEQ ID NO. 1561 | LM-3004.1 | From 1581777 | to 1582790 | unknown, similar to cell- |
| | | | | shape determining protein |
| | | | | MreB |
| SEQ ID NO. 1562 | LM-3005.1 | From 1580804 | to 1581691 | unknown, similar to cell- |
| | | | | shape determining protein |
| | | | | MreC |
| SEQ ID NO. 1563 | LM-3006.1 | From 1580283 | to 1580801 | unknown, similar to cell- |
| | | | | shape determining protein |
| | | | | MreD |
| SEQ ID NO. 1564 | LM-3007.2 | From 1579428 | to 1580105 | unknown, similar to cell- |
| | | | | division inhibition (septum |
| | | | | placement) protein MinC |
| SEQ ID NO. 1565 | LM-301.1 | From 2832058 | to 2833725 | Unknown, similar to acylase |
| | | | | and diesterase |
| SEQ ID NO. 1566 | LM-3010.1 | From 1149406 | to 1149720 | unknown, highly similar to |
| | | | | TN916 ORF23 |
| SEQ ID NO. 1567 | LM-3011.1 | From 1149011 | to 1149385 | unknown, highly similar to |
| | | | | TN916 ORF22 |
| SEQ ID NO. 1568 | LM-3012.1 | From 1147603 | to 1149003 | unknown, highly similar to |
| | | | | TN916 ORF21 |
| SEQ ID NO. 1569 | LM-3013.1 | From 1146228 | to 1147412 | unknown, highly similar to |
| | | | | TN916 ORF20 |
| SEQ ID NO. 1570 | LM-3014.1 | From 1145941 | to 1146231 | unknown, similar to |
| | | | | unknown proteins |
| SEQ ID NO. 1571 | LM-3016.1 | From 1145211 | to 1145711 | unknown, highly similar to |
| | | | | TN916 ORF18 |
| SEQ ID NO. 1572 | LM-3017.1 | From 1144533 | to 1144928 | unknown, highly similar to |
| | | | | TN916 ORF17 |
| SEQ ID NO. 1573 | LM-3018.1 | From 1142099 | to 1144549 | unknown, highly similar to |
| | | | | TN916 ORF16 |
| SEQ ID NO. 1574 | LM-3020.1 | From 1139940 | to 1142099 | unknown, highly similar to |
| | | | | TN916 ORF15 |
| SEQ ID NO. 1575 | LM-3022.1 | From 1138930 | to 1139940 | unknown, highly similar to |
| | | | | TN916 ORF14 and to L. monocytogenes |
| | | | | P60 protein |
| SEQ ID NO. 1576 | LM-3023.1 | From 1137997 | to 1138914 | unknown, highly similar to |
| | | | | TN916 ORF13 |
| SEQ ID NO. 1577 | LM-3024.1 | From 1137533 | to 1137868 | unknown, similar to |
| | | | | cadmium efflux system |
| | | | | accessory proteins |
| SEQ ID NO. 1578 | LM-3025.3 | From 1254459 | to 1254722 | unknown, similar to B. subtilis |
| | | | | YshA protein |
| SEQ ID NO. 1579 | LM-3027.3 | From 1253379 | to 1254311 | unknown, similar to B. subtilis |
| | | | | ribonuclease HIII |
| SEQ ID NO. 1580 | LM-3028.1 | From 1252667 | to 1253341 | Unknown, similar to uracil- |
| | | | | DNA glycosylase |
| SEQ ID NO. 1581 | LM-3029.1 | From 1249360 | to 1252560 | unknown; similar to |
| | | | | transporter, (to B. subtilis |
| | | | | YdgH protein) |
| SEQ ID NO. 1582 | LM-3030.1 | From 1248892 | to 1249344 | unknown; similar to |
| | | | | transcriptional regulator |
| | | | | (MarR family). |
| SEQ ID NO. 1583 | LM-3031.2 | From 1245384 | to 1248794 | unknown, similar to different |
| | | | | proteins |
| SEQ ID NO. 1584 | LM-3032.2 | From 1244669 | to 1245370 | unknown, similar to ABC |
| | | | | transporter, ATP-binding |
| | | | | proteins |
| SEQ ID NO. 1585 | LM-3035.2 | From 1608166 | to 1609923 | unknown, highly similar to |
| | | | | pyruvate kinases |
| SEQ ID NO. 1586 | LM-3036.1 | From 1607671 | to 1608048 | Unknown, similar to |
| | | | | unknown proteins |
| SEQ ID NO. 1587 | LM-3037.1 | From 1607053 | to 1607514 | Unknown, similar to |
| | | | | unknown proteins |
| SEQ ID NO. 1588 | LM-3038.1 | From 1605895 | to 1607016 | unknown, highly similar to |
| | | | | citrate synthase subunit II |
| SEQ ID NO. 1589 | LM-3039.1 | From 1604613 | to 1605875 | unknown, highly similar to |
| | | | | isocitrate dehyrogenases |
| SEQ ID NO. 1590 | LM-304.1 | From 2833834 | to 2835987 | Unknown, similar to DNA |
| | | | | topoisomerase III |
| SEQ ID NO. 1591 | LM-3041.1 | From 1601820 | to 1604447 | DNA polymerase I |
| SEQ ID NO. 1592 | LM-3042.1 | From 1600975 | to 1601796 | unknown, highly similar to |
| | | | | formamidopyrimidine-DNA |
| | | | | glycosylases |
| SEQ ID NO. 1593 | LM-3043.2 | From 1600356 | to 1600958 | Unknown, similar to |
| | | | | unknown proteins |
| SEQ ID NO. 1594 | LM-3044.2 | From 1875574 | to 1876560 | Unknown, similar to FtsY of |
| | | | | E. coli and SRP receptor |
| | | | | alpha-subunit |
| SEQ ID NO. 1595 | LM-3049.1 | From 1876575 | to 1880135 | Unknown, similar to Smc |
| | | | | protein essential for |
| | | | | chromosome condensation |
| | | | | and partition |
| SEQ ID NO. 1596 | LM-3050.1 | From 1880158 | to 1880847 | Unknown, similar to |
| | | | | ribonuclease III |
| SEQ ID NO. 1597 | LM-3053.1 | From 1881381 | to 1882124 | Unknown, similar to 3- |
| | | | | ketoacyl-acyl carrier protein |
| | | | | reductase |
| SEQ ID NO. 1598 | LM-3054.1 | From 1882128 | to 1883069 | Unknown, similar to malonyl |
| | | | | CoA-acyl carrier protein |
| | | | | transacylase |
| SEQ ID NO. 1599 | LM-3056.1 | From 1883062 | to 1884075 | Unknown, similar to plsX |
| | | | | protein involved in fatty |
| | | | | acid/phospholipid synthesis |
| SEQ ID NO. 1600 | LM-3058.2 | From 1884096 | to 1884665 | Unknown, similar to |
| | | | | unknown proteins |
| SEQ ID NO. 1601 | LM-3059.2 | From 817914 | to 818762 | Unknown, similar to |
| | | | | conserved hypothetical |
| | | | | proteins |
| SEQ ID NO. 1602 | LM-3062.1 | From 813451 | to 817878 | Unknown |
| SEQ ID NO. 1603 | LM-3065.3 | From 811813 | to 813189 | Unknown, similar to amino |
| | | | | acid transporter |
| SEQ ID NO. 1604 | LM-3066.2 | From 2159224 | to 2159604 | Unknown |
| SEQ ID NO. 1605 | LM-3067.1 | From 2157949 | to 2159094 | Unknown |
| SEQ ID NO. 1606 | LM-3068.1 | From 2157383 | to 2157844 | Unknown, similar to |
| | | | | unknown proteins |
| SEQ ID NO. 1607 | LM-3069.1 | From 2156694 | to 2157386 | Unknown, similar to |
| | | | | glycoprotease |
| SEQ ID NO. 1608 | LM-307.1 | From 2836011 | to 2837783 | Unknown, similar to ATP- |
| | | | | dependent DNA helicases |
| SEQ ID NO. 1609 | LM-3070.1 | From 2156242 | to 2156697 | Unknown, similar to |
| | | | | ribosomal protein alanine |
| | | | | acetyltransferase |
| SEQ ID NO. 1610 | LM-3072.1 | From 2155223 | to 2156245 | Unknown, similar to |
| | | | | glycoprotein endopeptidase |
| SEQ ID NO. 1611 | LM-3073.1 | From 2153720 | to 2154679 | Unknown, similar to |
| | | | | unknown proteins |
| SEQ ID NO. 1612 | LM-3074.1 | From 2151744 | to 2153696 | Unknown, similar to ABC |
| | | | | transporter (ATP-binding |
| | | | | protein) |
| SEQ ID NO. 1613 | LM-3075.1 | From 2150786 | to 2151433 | Unknown, similar to a |
| | | | | putative DNA binding |
| | | | | proteins |
| SEQ ID NO. 1614 | LM-3076.2 | From 2149868 | to 2150554 | Unknown, similar to |
| | | | | unknown proteins |
| SEQ ID NO. 1615 | LM-3077.2 | From 992978 | to 993886 | unknown, similar to |
| | | | | proteases |
| SEQ ID NO. 1616 | LM-3080.1 | From 993900 | to 995126 | unknown, similar to |
| | | | | proteases |
| SEQ ID NO. 1617 | LM-3081.1 | From 995210 | to 995767 | unknown, Listeria epitope |
| | | | | LemA |
| SEQ ID NO. 1618 | LM-3083.1 | From 995790 | to 996704 | unknown, similar to putative |
| | | | | heat shock protein HtpX, |
| | | | | Listeria epitope LemB |
| SEQ ID NO. 1619 | LM-3084.1 | From 996739 | to 997557 | unknown, similar to B. subtilis |
| | | | | YjbH protein |
| SEQ ID NO. 1620 | LM-3085.1 | From 997795 | to 998379 | unknown, similar to B. subtilis |
| | | | | YjbK protein |
| SEQ ID NO. 1621 | LM-3086.2 | From 998396 | to 998863 | Unknown |
| SEQ ID NO. 1622 | LM-3087.2 | From 999022 | to 999690 | unknown, similar to B. subtilis |
| | | | | YjbM protein |
| SEQ ID NO. 1623 | LM-3088.1 | From 999722 | to 1000516 | unknown, similar to |
| | | | | conserved hypothetical |
| | | | | proteins like to B. subtilis |
| | | | | YjbN protein |
| SEQ ID NO. 1624 | LM-3089.1 | From 1000535 | to 1001425 | unknown, similar to |
| | | | | ribosomal large subunit |
| | | | | pseudouridine synthetase |
| SEQ ID NO. 1625 | LM-309.2 | From 2837944 | to 2839410 | Unknown, similar to inosine- |
| | | | | monophosphate |
| | | | | dehydrogenase |
| SEQ ID NO. 1626 | LM-3090.1 | From 1001503 | to 1002291 | unknown, similar to enoyl- |
| | | | | acyl-carrier protein |
| | | | | reductase |
| SEQ ID NO. 1627 | LM-3091.1 | From 1002319 | to 1003593 | DltD protein for D-alanine |
| | | | | esterification of lipoteichoic |
| | | | | acid and wall teichoic acid |
| SEQ ID NO. 1628 | LM-3092.1 | From 1003855 | to 1005039 | DltB protein for D-alanine |
| | | | | esterification of lipoteichoic |
| | | | | acid and wall teichoic acid |
| SEQ ID NO. 1629 | LM-3093.2 | From 1005036 | to 1006568 | D-alanine-activating |
| | | | | enzyme (dae), D-alanine-D- |
| | | | | alanyl carrier protein ligase |
| | | | | (dcl) |
| SEQ ID NO. 1630 | LM-3095.2 | From 1364031 | to 1364570 | unknown, similar to 5- |
| | | | | formyltetrahydrofolate cycloligase |
| SEQ ID NO. 1631 | LM-3097.1 | From 1364669 | to 1366207 | unknown similar to B. subtilis |
| | | | | yqgP |
| SEQ ID NO. 1632 | LM-3098.1 | From 1366457 | to 1367425 | Unknown, similar to glucose |
| | | | | kinase |
| SEQ ID NO. 1633 | LM-3099.1 | From 1367559 | to 1368650 | unknown, similar to B. subtilis |
| | | | | YqgU protein |
| SEQ ID NO. 1634 | LM-3100.1 | From 1368668 | to 1368985 | Unknown, weakly similar to |
| | | | | B. subtilis comG operon |
| | | | | protein 7 (comGG) |
| SEQ ID NO. 1635 | LM-3101.1 | From 1368982 | to 1369449 | Unknown, similar to B. subtilis |
| | | | | comG operon |
| | | | | protein 6 |
| SEQ ID NO. 1636 | LM-3102.1 | From 1369412 | to 1369696 | Unknown, similar to comG |
| | | | | operon protein 5 (comGE) |
| SEQ ID NO. 1637 | LM-3103.1 | From 1369683 | to 1370111 | Unknown, similar to comG |
| | | | | operon protein 4 (comGD) |
| SEQ ID NO. 1638 | LM-3104.1 | From 1370108 | to 1370431 | Unknown, similar to B. subtilis |
| | | | | comG operon |
| | | | | protein 3 |
| SEQ ID NO. 1639 | LM-3105.1 | From 1370445 | to 1371476 | Unknown, similar to B. subtilis |
| | | | | comG operon |
| | | | | protein 2 |
| SEQ ID NO. 1640 | LM-3106.1 | From 1371454 | to 1372476 | Unknown, similar to B. subtilis |
| | | | | comG operon |
| | | | | protein 1 |
| SEQ ID NO. 1641 | LM-3107.1 | From 1373015 | to 1374103 | Unknown, similar to |
| | | | | aminomethyltransferase |
| SEQ ID NO. 1642 | LM-3110.3 | From 1374119 | to 1375465 | Unknown, similar to glycine |
| | | | | dehydrogenase |
| | | | | (decarboxylating) subunit 1 |
| SEQ ID NO. 1643 | LM-3111.1 | From 1375462 | to 1376928 | Unknown, similar to glycine |
| | | | | dehydrogenase |
| | | | | (decarboxylating) subunit 2 |
| SEQ ID NO. 1644 | LM-3112.1 | From 1376968 | to 1377348 | Unknown |
| SEQ ID NO. 1645 | LM-3113.1 | From 1377410 | to 1377682 | Unknown |
| SEQ ID NO. 1646 | LM-3114.2 | From 1377695 | to 1378660 | Unknown, similar to B. subtilis |
| | | | | YqhQ protein |
| SEQ ID NO. 1647 | LM-3115.3 | From 1962698 | to 1963243 | unknown, similar to |
| | | | | conserved hypothetical |
| | | | | proteins |
| SEQ ID NO. 1648 | LM-3116.2 | From 1962225 | to 1962566 | unknown, similar to |
| | | | | hypothetical proteins |
| SEQ ID NO. 1649 | LM-3119.1 | From 1960496 | to 1961644 | unknown, similar to |
| | | | | conserved hypothetical |
| | | | | proteins |
| SEQ ID NO. 1650 | LM-312.1 | From 130652 | to 131380 | Unknown, similar to |
| | | | | autolysin: N- |
| | | | | acetylmuramoyl-L-alanine |
| | | | | amidase |
| SEQ ID NO. 1651 | LM-3120.1 | From 1958968 | to 1960476 | unknown, similar to |
| | | | | probable thermostable |
| | | | | carboxypeptidases |
| SEQ ID NO. 1652 | LM-3121.1 | From 1958162 | to 1958740 | unknown, similar to |
| | | | | xanthine |
| | | | | phosphoribosyltransferase |
| SEQ ID NO. 1653 | LM-3124.1 | From 1956848 | to 1958155 | unknown, similar to |
| | | | | probable permeases |
| SEQ ID NO. 1654 | LM-3126.1 | From 1955598 | to 1956656 | unknown, similar to |
| | | | | chitinases |
| SEQ ID NO. 1655 | LM-3127.2 | From 1955205 | to 1955474 | unknown, similar to |
| | | | | ribosomal protein S14 |
| SEQ ID NO. 1656 | LM-3128.3 | From 1954255 | to 1955127 | unknown, similar to 5′-3′- |
| | | | | exonuclease |
| SEQ ID NO. 1657 | LM-3129.1 | From 248555 | to 249013 | Unknown, highly similar to |
| | | | | transcription repressor of |
| | | | | class III stress genes (CtsR) |
| SEQ ID NO. 1658 | LM-313.1 | From 130249 | to 130671 | Unknown, similar to a |
| | | | | protein from Bacteriophage |
| | | | | phi-105 (ORF 45) |
| SEQ ID NO. 1659 | LM-3130.1 | From 249026 | to 249544 | Unknown, similar to B. subtilis |
| | | | | YacH protein |
| SEQ ID NO. 1660 | LM-3131.1 | From 249541 | to 250563 | Unknown, similar to arginine |
| | | | | kinase |
| SEQ ID NO. 1661 | LM-3135.1 | From 250592 | to 253054 | endopeptidase Clp ATP- |
| | | | | binding chain C |
| SEQ ID NO. 1662 | LM-3136.2 | From 253200 | to 254573 | unknown, similar to DNA |
| | | | | repair protein Sms |
| SEQ ID NO. 1663 | LM-3139.2 | From 254707 | to 255780 | Unknown, highly similar to |
| | | | | B. subtilis YacL protein |
| SEQ ID NO. 1664 | LM-314.1 | From 129694 | to 130230 | Unknown, weakly similar to |
| | | | | protein gp20 from |
| | | | | Bacteriophage A118 |
| SEQ ID NO. 1665 | LM-3140.2 | From 255800 | to 256498 | Unknown, similar to |
| | | | | nucleotidylyl transferase; |
| | | | | pyrophosphorylase |
| SEQ ID NO. 1666 | LM-3141.2 | From 348586 | to 349065 | Unknown |
| SEQ ID NO. 1667 | LM-3142.2 | From 349326 | to 350228 | Unknown, similar to |
| | | | | transcriptional regulators |
| SEQ ID NO. 1668 | LM-3143.1 | From 350392 | to 351264 | Unknown, similar to |
| | | | | transcriptional regulators |
| SEQ ID NO. 1669 | LM-3147.1 | From 355643 | to 356323 | Unknown |
| SEQ ID NO. 1670 | LM-3149.2 | From 2602249 | to 2602683 | Unknown, similar to |
| | | | | hydroxymyristoyl-(acyl |
| | | | | carrier protein) dehydratase |
| SEQ ID NO. 1671 | LM-315.1 | From 129218 | to 129697 | Unknown |
| SEQ ID NO. 1672 | LM-3150.1 | From 2601632 | to 2601997 | Unknown, similar to single- |
| | | | | strand DNA-binding protein |
| SEQ ID NO. 1673 | LM-3151.1 | From 2600408 | to 2601241 | Unknown, similar to |
| | | | | hypothetical cell wall |
| | | | | binding protein from B. subtilis |
| SEQ ID NO. 1674 | LM-3152.1 | From 2599548 | to 2600282 | Unknown, similar to B. subtilis |
| | | | | TagA protein |
| | | | | involved in polyglycerol |
| | | | | phosphate biosynthesis |
| SEQ ID NO. 1675 | LM-3153.1 | From 2598423 | to 2599547 | Unknown, similar to B. subtilis |
| | | | | O-succinylbenzoate- |
| | | | | CoA synthase (MenC) |
| SEQ ID NO. 1676 | LM-3154.1 | From 2597363 | to 2598415 | Unknown, similar to B. subtilis |
| | | | | TagO teichoic acid |
| | | | | linkage unit synthesis |
| | | | | protein |
| SEQ ID NO. 1677 | LM-3155.1 | From 2596266 | to 2597324 | Unknown, similar to B. subtilis |
| | | | | putative |
| | | | | transcriptional regulator |
| | | | | LytR |
| SEQ ID NO. 1678 | LM-3156.1 | From 2595485 | to 2596090 | Unknown |
| SEQ ID NO. 1679 | LM-3157.1 | From 2594908 | to 2595543 | Unknown, similar to |
| | | | | conserved hypothetical |
| | | | | proteins |
| SEQ ID NO. 1680 | LM-3158.1 | From 2593837 | to 2594523 | Unknown, similar to B. subtilis |
| | | | | two-component |
| | | | | response regulator DegU |
| SEQ ID NO. 1681 | LM-3159.1 | From 2592965 | to 2593816 | Unknown, similar to B. subtilis |
| | | | | YviA (DegV) protein |
| SEQ ID NO. 1682 | LM-316.1 | From 128628 | to 129203 | Unknown |
| SEQ ID NO. 1683 | LM-3162.1 | From 2591451 | to 2592770 | unknown, similar to late |
| | | | | competence protein comFA |
| SEQ ID NO. 1684 | LM-3163.2 | From 2590802 | to 2591458 | unknown, similar to late |
| | | | | competence protein comFC |
| SEQ ID NO. 1685 | LM-3164.2 | From 2590044 | to 2590607 | Unknown, similar to |
| | | | | conserved hypothetical |
| | | | | proteins like to B. subtilis |
| | | | | YvyD protein |
| SEQ ID NO. 1686 | LM-3167.1 | From 2020738 | to 2021256 | Unknown, similar to similar |
| | | | | to acyl-CoA hydrolase |
| SEQ ID NO. 1687 | LM-3168.1 | From 2021272 | to 2023062 | Unknown, similar to two- |
| | | | | component sensor histidine |
| | | | | kinase (ResE) |
| SEQ ID NO. 1688 | LM-3169.1 | From 2023163 | to 2023879 | Unknown, similar to two- |
| | | | | component response |
| | | | | regulator (ResD) |
| SEQ ID NO. 1689 | LM-317.1 | From 128314 | to 128613 | Unknown |
| SEQ ID NO. 1690 | LM-3171.1 | From 2024062 | to 2024796 | Unknown, similar to |
| | | | | unknown proteins |
| SEQ ID NO. 1691 | LM-3172.1 | From 2024799 | to 2025395 | Unknown, similar to |
| | | | | unknown proteins |
| SEQ ID NO. 1692 | LM-3174.1 | From 2025392 | to 2026141 | Unknown, similar to |
| | | | | unknown proteins |
| SEQ ID NO. 1693 | LM-3177.1 | From 2026157 | to 2027467 | Unknown, similar to |
| | | | | diaminopimelate |
| | | | | decarboxylase |
| SEQ ID NO. 1694 | LM-3178.1 | From 2027648 | to 2028466 | Unknown, similar to purine- |
| | | | | nucleoside phosphorylase |
| SEQ ID NO. 1695 | LM-3179.2 | From 2028485 | to 2029669 | Unknown, similar to |
| | | | | phosphopentomutase |
| SEQ ID NO. 1696 | LM-3181.2 | From 2029698 | to 2030591 | Unknown, similar to |
| | | | | integrase/recombinase |
| SEQ ID NO. 1697 | LM-3184.2 | From 635317 | to 636423 | Unknown, similar to |
| | | | | homoserine O- |
| | | | | acetyltransferase |
| SEQ ID NO. 1698 | LM-3186.1 | From 636440 | to 637717 | Unknown, similar to O- |
| | | | | acetylhomoserine |
| | | | | sulfhydrylase |
| SEQ ID NO. 1699 | LM-3188.1 | From 638165 | to 638692 | Unknown, similar to |
| | | | | unknown proteins |
| SEQ ID NO. 1700 | LM-3189.1 | From 638781 | to 639482 | Unknown, similar to |
| | | | | transcription regulator |
| | | | | CRP/FNR family |
| SEQ ID NO. 1701 | LM-319.1 | From 127188 | to 128324 | Unknown, similar to protein |
| | | | | gp18 from Bacteriophage |
| | | | | A118 |
| SEQ ID NO. 1702 | LM-3190.2 | From 639558 | to 640106 | Unknown, similar to proteins |
| | | | | involved in biotin |
| | | | | metabolism (BioY) |
| SEQ ID NO. 1703 | LM-3191.2 | From 1537815 | to 1538501 | Unknown, similar to two- |
| | | | | component response |
| | | | | regulators |
| SEQ ID NO. 1704 | LM-3192.1 | From 1538498 | to 1539937 | Unknown, similar to two- |
| | | | | component sensor histidine |
| | | | | kinase |
| SEQ ID NO. 1705 | LM-3194.1 | From 1539979 | to 1542375 | Unknown, similar to |
| | | | | exodeoxyribonuclease V |
| SEQ ID NO. 1706 | LM-3195.1 | From 1542403 | to 1543041 | Unknown, similar to |
| | | | | unknown proteins |
| SEQ ID NO. 1707 | LM-3196.1 | From 1543082 | to 1543822 | Unknown, similar to |
| | | | | unknown proteins |
| SEQ ID NO. 1708 | LM-3198.1 | From 1543940 | to 1545055 | Unknown, similar to putative |
| | | | | tRNA (5- |
| | | | | methylaminomethyl-2- |
| | | | | thiouridylate)- |
| | | | | methyltransferase |
| SEQ ID NO. 1709 | LM-32.1 | From 2733230 | to 2735245 | Unknown, similar to |
| | | | | transketolase |
| SEQ ID NO. 1710 | LM-3200.2 | From 1545074 | to 1546222 | Unknown, similar to iron- |
| | | | | sulfur cofactor synthesis |
| | | | | protein |
| SEQ ID NO. 1711 | LM-3201.2 | From 1527422 | to 1527904 | Unknown, similar to |
| | | | | transcription elongation |
| | | | | factor GreA |
| SEQ ID NO. 1712 | LM-3203.2 | From 1526748 | to 1527371 | Unknown, similar to |
| | | | | unknown proteins |
| SEQ ID NO. 1713 | LM-3204.1 | From 1525997 | to 1526698 | Unknown, similar to 5- |
| | | | | methylthioadenosine/S- |
| | | | | adenosylhomocysteine |
| | | | | nucleosidase |
| SEQ ID NO. 1714 | LM-3205.1 | From 1524154 | to 1525962 | Unknown, similar to |
| | | | | oligopeptidase |
| SEQ ID NO. 1715 | LM-3206.2 | From 1523471 | to 1523992 | Unknown, similar to |
| | | | | unknown proteins |
| SEQ ID NO. 1716 | LM-3208.2 | From 1522374 | to 1523474 | Unknown, similar to |
| | | | | unknown proteins |
| SEQ ID NO. 1717 | LM-3209.1 | From 1521533 | to 1522354 | Unknown, similar to |
| | | | | shikimate 5-dehydrogenase |
| | | | | (AroD) |
| SEQ ID NO. 1718 | LM-321.1 | From 126360 | to 127178 | Unknown, similar to phage |
| | | | | proteins |
| SEQ ID NO. 1719 | LM-3210.1 | From 1521243 | to 1521533 | Unknown, similar to |
| | | | | unknown proteins |
| SEQ ID NO. 1720 | LM-3211.1 | From 1520659 | to 1521225 | Unknown, similar to |
| | | | | unknown proteins |
| SEQ ID NO. 1721 | LM-3212.1 | From 1520097 | to 1520672 | Unknown, similar to |
| | | | | unknown proteins |
| SEQ ID NO. 1722 | LM-3213.1 | From 1519736 | to 1520092 | Unknown |
| SEQ ID NO. 1723 | LM-3214.1 | From 1518950 | to 1519681 | Unknown, similar to |
| | | | | unknown proteins |
| SEQ ID NO. 1724 | LM-3215.1 | From 1518245 | to 1518847 | Unknown, similar to integral |
| | | | | membrane protein ComEA |
| SEQ ID NO. 1725 | LM-3216.1 | From 1517613 | to 1518173 | Unknown, similar to B. subtilis |
| | | | | ComEB protein |
| SEQ ID NO. 1726 | LM-3217.2 | From 1515356 | to 1517578 | Unknown, similar to putative |
| | | | | integral membrane protein |
| | | | | ComEC specifically required |
| | | | | for DNA uptake but not for |
| | | | | binding |
| SEQ ID NO. 1727 | LM-3218.2 | From 1418803 | to 1420095 | Unknown, similar to putative |
| | | | | proteases |
| SEQ ID NO. 1728 | LM-3220.1 | From 1417735 | to 1418685 | Unknown, similar to sugar |
| | | | | ABC transporter, permease |
| | | | | protein |
| SEQ ID NO. 1729 | LM-3221.1 | From 1416686 | to 1417738 | Unknown, similar to |
| | | | | permease proteins |
| SEQ ID NO. 1730 | LM-3223.1 | From 1415152 | to 1416693 | Unknown, similar to sugar |
| | | | | ABC transporter, ATP- |
| | | | | binding protein |
| SEQ ID NO. 1731 | LM-3226.3 | From 1413646 | to 1414719 | Unknown, CD4+ T cell- |
| | | | | stimulating antigen, |
| | | | | lipoprotein |
| SEQ ID NO. 1732 | LM-3228.3 | From 1412455 | to 1413294 | Unknown, similar to |
| | | | | pyrroline-5-carboxylate |
| | | | | reductase |
| SEQ ID NO. 1733 | LM-3231.1 | From 1410148 | to 1412421 | Unknown, similar to DNA |
| | | | | translocase |
| SEQ ID NO. 1734 | LM-3234.2 | From 843311 | to 843724 | Unknown, similar to E. coli |
| | | | | PhnB protein |
| SEQ ID NO. 1735 | LM-3235.1 | From 842781 | to 843287 | Unknown, similar to B. subtilis |
| | | | | regulatory protein |
| | | | | PaiA |
| SEQ ID NO. 1736 | LM-3237.1 | From 842313 | to 842765 | unknown, similar to |
| | | | | transcription regulators |
| SEQ ID NO. 1737 | LM-3239.1 | From 841157 | to 842086 | unknown, similar to |
| | | | | oxidoreductases |
| SEQ ID NO. 1738 | LM-324.1 | From 124495 | to 126363 | unknown, similar to |
| | | | | bacteriophage minor tail |
| | | | | proteins |
| SEQ ID NO. 1739 | LM-3241.1 | From 840200 | to 841072 | unknown, similar to |
| | | | | fructokinases |
| SEQ ID NO. 1740 | LM-3243.3 | From 839520 | to 840062 | unknown |
| SEQ ID NO. 1741 | LM-3244.3 | From 838751 | to 839452 | unknown, similar to |
| | | | | carbonic anhydrase |
| SEQ ID NO. 1742 | LM-3246.1 | From 837548 | to 838621 | Unknown, similar to |
| | | | | spermidine/putrescine- |
| | | | | binding protein |
| SEQ ID NO. 1743 | LM-3248.1 | From 836745 | to 837551 | unknown, similar to |
| | | | | spermidine/putrescine ABC |
| | | | | transporter, permease |
| | | | | protein |
| SEQ ID NO. 1744 | LM-3249.1 | From 835939 | to 836748 | unknown, similar to |
| | | | | spermidine/putrescine ABC |
| | | | | transporter, permease |
| | | | | protein |
| SEQ ID NO. 1745 | LM-3250.1 | From 834845 | to 835939 | unknown, similar to |
| | | | | spermidine/putrescine ABC |
| | | | | transporter, ATP-binding |
| | | | | protein |
| SEQ ID NO. 1746 | LM-3251.2 | From 834287 | to 834829 | unknown, similar to |
| | | | | transcription regulator |
| SEQ ID NO. 1747 | LM-3252.2 | From 1724612 | to 1725565 | unknown, similar to ABC |
| | | | | transporter and adhesion |
| | | | | proteins |
| SEQ ID NO. 1748 | LM-3254.1 | From 1725584 | to 1726993 | similar to O-succinylbenzoic |
| | | | | acid-CoA ligase |
| SEQ ID NO. 1749 | LM-3255.1 | From 1727009 | to 1727827 | unknown, similar to |
| | | | | dihydroxynapthoic acid |
| | | | | synthetase |
| SEQ ID NO. 1750 | LM-3256.1 | From 1727824 | to 1728651 | unknown, similar to prolyl |
| | | | | aminopetidases |
| SEQ ID NO. 1751 | LM-3258.1 | From 1728653 | to 1730395 | unknown, similar to 2- |
| | | | | succinyl-6-hydroxy-2,4- |
| | | | | cyclohexadiene-1- |
| | | | | carboxylate synthase/2- |
| | | | | oxoglutarate decarboxylase |
| SEQ ID NO. 1752 | LM-326.1 | From 124104 | to 124508 | unknown |
| SEQ ID NO. 1753 | LM-3260.2 | From 1730392 | to 1731780 | unknown, similar to |
| | | | | menaquinone-specific |
| | | | | isochorismate synthase |
| SEQ ID NO. 1754 | LM-3261.2 | From 2308741 | to 2311464 | Unknown, similar to |
| | | | | unknown proteins |
| SEQ ID NO. 1755 | LM-3262.1 | From 2311461 | to 2312696 | Unknown, similar to |
| | | | | unknown proteins |
| SEQ ID NO. 1756 | LM-3263.1 | From 2312839 | to 2313192 | Unknown, similar to |
| | | | | unknown proteins |
| SEQ ID NO. 1757 | LM-3265.1 | From 2313274 | to 2314407 | Unknown, similar to |
| | | | | unknown proteins |
| SEQ ID NO. 1758 | LM-3266.1 | From 2314511 | to 2315878 | Unknown, similar to |
| | | | | fumarate hydratase |
| SEQ ID NO. 1759 | LM-3267.1 | From 2315948 | to 2316742 | Unknown, similar to |
| | | | | unknown proteins |
| SEQ ID NO. 1760 | LM-3268.1 | From 2316739 | to 2317644 | Unknown, similar to ABC |
| | | | | transporter (ATP-binding |
| | | | | protein) |
| SEQ ID NO. 1761 | LM-3269.2 | From 2317950 | to 2320094 | Unknown, similar to |
| | | | | penicillin-binding protein |
| SEQ ID NO. 1762 | LM-3274.2 | From 558526 | to 560187 | Unknown, similar to putative |
| | | | | sulfate transporter |
| SEQ ID NO. 1763 | LM-3275.1 | From 558037 | to 558480 | Unknown, similar to B. subtilis |
| | | | | YybC protein |
| SEQ ID NO. 1764 | LM-3276.1 | From 557178 | to 557930 | Unknown, similar to |
| | | | | transcription regulator |
| SEQ ID NO. 1765 | LM-3278.1 | From 555660 | to 556976 | Unknown, similar to 6- |
| | | | | phospho-beta-glucosidase |
| SEQ ID NO. 1766 | LM-328.1 | From 123760 | to 124062 | Unknown |
| SEQ ID NO. 1767 | LM-3281.1 | From 554624 | to 555628 | Unknown, similar to |
| | | | | transcription regulator |
| SEQ ID NO. 1768 | LM-3283.2 | From 553078 | to 554493 | Unknown, similar to |
| | | | | multidrug resistance protein |
| SEQ ID NO. 1769 | LM-3284.1 | From 514004 | to 514381 | Unknown, putative secreted |
| | | | | protein |
| SEQ ID NO. 1770 | LM-3285.1 | From 514681 | to 515058 | Unknown, putative secreted |
| | | | | protein |
| SEQ ID NO. 1771 | LM-3286.1 | From 515391 | to 515750 | Unknown, putative secreted |
| | | | | protein |
| SEQ ID NO. 1772 | LM-3288.1 | From 516076 | to 516636 | Unknown |
| SEQ ID NO. 1773 | LM-329.1 | From 123200 | to 123712 | antigen A |
| SEQ ID NO. 1774 | LM-3290.1 | From 516746 | to 518446 | Unknown, similar to |
| | | | | unknown proteins |
| SEQ ID NO. 1775 | LM-3292.1 | From 518597 | to 519700 | Unknown, similar to |
| | | | | conserved hypothetical |
| | | | | proteins, highly similar to B. subtilis |
| | | | | YloN protein |
| SEQ ID NO. 1776 | LM-3293.1 | From 519789 | to 520268 | Unknown |
| SEQ ID NO. 1777 | LM-3294.2 | From 520426 | to 520791 | Unknown |
| SEQ ID NO. 1778 | LM-3296.2 | From 1561538 | to 1561882 | Unknown, similar to |
| | | | | unknown proteins |
| SEQ ID NO. 1779 | LM-3298.1 | From 1559081 | to 1561432 | Unknown, similar to single- |
| | | | | stranded-DNA-specific |
| | | | | exonuclease (RecJ) |
| SEQ ID NO. 1780 | LM-3299.1 | From 1558570 | to 1559091 | unknown, similar to adenine |
| | | | | phosphoribosyltransferase |
| SEQ ID NO. 1781 | LM-330.1 | From 122798 | to 123187 | antigen B |
| SEQ ID NO. 1782 | LM-3301.1 | From 1556148 | to 1558364 | unknown, similar to |
| | | | | (p)ppGpp synthetase |
| SEQ ID NO. 1783 | LM-3302.1 | From 1555680 | to 1556132 | Unknown, similar to |
| | | | | unknown proteins |
| SEQ ID NO. 1784 | LM-3303.2 | From 1554360 | to 1555643 | Unknown, similar to N- |
| | | | | acetylmuramoyl-L-alanine |
| | | | | amidase |
| SEQ ID NO. 1785 | LM-3305.2 | From 2279524 | to 2279919 | Unknown, similar to |
| | | | | unknown proteins |
| SEQ ID NO. 1786 | LM-3306.1 | From 2280238 | to 2281206 | Unknown, similar to |
| | | | | oligopeptide ABC |
| | | | | transporter (ATP-binding |
| | | | | protein) |
| SEQ ID NO. 1787 | LM-3307.1 | From 2281203 | to 2282279 | Unknown, similar to |
| | | | | oligopeptide ABC |
| | | | | transporter (ATP-binding |
| | | | | protein) |
| SEQ ID NO. 1788 | LM-3309.1 | From 2282297 | to 2283331 | Unknown, similar to |
| | | | | oligopeptide ABC |
| | | | | transporter (permease) |
| SEQ ID NO. 1789 | LM-331.1 | From 122104 | to 122520 | unknown, similar to |
| | | | | Antigen C |
| SEQ ID NO. 1790 | LM-3310.1 | From 2283331 | to 2284260 | Unknown, similar to |
| | | | | oligopeptide ABC |
| | | | | transporter (permease) |
| SEQ ID NO. 1791 | LM-3312.2 | From 2284539 | to 2286215 | Unknown, similar to |
| | | | | pheromone binding protein |
| SEQ ID NO. 1792 | LM-3315.1 | From 1528098 | to 1528727 | unknown, similar to Uridine |
| | | | | kinase |
| SEQ ID NO. 1793 | LM-3316.1 | From 1528724 | to 1529377 | Unknown, similar to O- |
| | | | | methyltransferase |
| SEQ ID NO. 1794 | LM-3319.1 | From 1529454 | to 1530524 | Unknown, similar to |
| | | | | unknown proteins |
| SEQ ID NO. 1795 | LM-332.1 | From 121664 | to 122092 | unknown, similar to |
| | | | | Antigen D |
| SEQ ID NO. 1796 | LM-3320.1 | From 1530727 | to 1531353 | Unknown, similar to |
| | | | | unknown proteins |
| SEQ ID NO. 1797 | LM-3321.1 | From 1531398 | to 1531700 | Unknown, similar to |
| | | | | unknown proteins |
| SEQ ID NO. 1798 | LM-3322.1 | From 1531716 | to 1532132 | Unknown, similar to |
| | | | | unknown proteins |
| SEQ ID NO. 1799 | LM-3323.1 | From 1532129 | to 1532401 | Unknown |
| SEQ ID NO. 1800 | LM-3326.1 | From 1532493 | to 1535132 | alanyl-tRNA synthetase |
| SEQ ID NO. 1801 | LM-3327.1 | From 1535439 | to 1536134 | Unknown, similar to ABC |
| | | | | transporter, ATP-binding |
| | | | | protein |
| SEQ ID NO. 1802 | LM-3329.2 | From 1536143 | to 1537648 | Unknown, similar to |
| | | | | transporter |
| SEQ ID NO. 1803 | LM-333.1 | From 121112 | to 121447 | Unknown, similar to putative |
| | | | | repressor C1 From |
| | | | | lactococcal bacteriophage |
| | | | | Tuc2009 |
| SEQ ID NO. 1804 | LM-3330.2 | From 512291 | to 513268 | Unknown, similar to |
| | | | | oxetanocin A resistance |
| | | | | protein oxrB |
| SEQ ID NO. 1805 | LM-3331.1 | From 511966 | to 512208 | Unknown |
| SEQ ID NO. 1806 | LM-3332.1 | From 511215 | to 511562 | Unknown |
| SEQ ID NO. 1807 | LM-3333.1 | From 510163 | to 511212 | Unknown |
| SEQ ID NO. 1808 | LM-3334.1 | From 509400 | to 510287 | Unknown |
| SEQ ID NO. 1809 | LM-3335.2 | From 507723 | to 508733 | Unknown |
| SEQ ID NO. 1810 | LM-3336.3 | From 506368 | to 506997 | Unknown, weakly similar to |
| | | | | site-specific DNA- |
| | | | | methyltransferase |
| SEQ ID NO. 1811 | LM-3337.3 | From 505351 | to 506223 | Unknown |
| SEQ ID NO. 1812 | LM-3338.2 | From 1487699 | to 1489579 | DNA primase |
| SEQ ID NO. 1813 | LM-3339.1 | From 1489599 | to 1490039 | Unknown, similar to |
| | | | | unknown proteins |
| SEQ ID NO. 1814 | LM-334.1 | From 120654 | to 121106 | Unknown, similar to protein |
| | | | | gp35 From Bacteriophage |
| | | | | A118 |
| SEQ ID NO. 1815 | LM-3340.1 | From 1490229 | to 1491053 | Unknown, similar to |
| | | | | unknown protein |
| SEQ ID NO. 1816 | LM-3341.1 | From 1491087 | to 1493153 | Unknown, similar to glycyl- |
| | | | | tRNA synthetase beta chain |
| SEQ ID NO. 1817 | LM-3342.1 | From 1493146 | to 1494036 | Unknown, similar to glycyl- |
| | | | | tRNA synthetase alpha |
| | | | | chain |
| SEQ ID NO. 1818 | LM-3343.1 | From 1494317 | to 1495084 | Unknown, similar to B. subtilis |
| | | | | RecO protein |
| | | | | involved in DNA repair and |
| | | | | homologous recombination |
| SEQ ID NO. 1819 | LM-3344.1 | From 1495221 | to 1495850 | Unknown |
| SEQ ID NO. 1820 | LM-3345.1 | From 1495899 | to 1496804 | Unknown, similar to GTP |
| | | | | binding proteins |
| SEQ ID NO. 1821 | LM-3347.1 | From 1496801 | to 1497196 | Unknown, similar to cytidine |
| | | | | deaminase |
| SEQ ID NO. 1822 | LM-3348.1 | From 1497221 | to 1497616 | Unknown, similar to |
| | | | | diacylglycerol kinase |
| SEQ ID NO. 1823 | LM-3349.1 | From 1497594 | to 1498079 | Unknown, similar to |
| | | | | unknown proteins |
| SEQ ID NO. 1824 | LM-335.1 | From 119740 | to 120435 | Unknown, weakly similar to |
| | | | | transcription regulators, |
| | | | | Fnr/Crp family |
| SEQ ID NO. 1825 | LM-3355.1 | From 2012582 | to 2013727 | Unknown, similar to similar |
| | | | | to ribosomal protein S1 like |
| | | | | protein |
| SEQ ID NO. 1826 | LM-3356.1 | From 2014086 | to 2014760 | Unknown, similar to |
| | | | | cytidylate kinase |
| SEQ ID NO. 1827 | LM-3357.1 | From 2014776 | to 2015738 | Unknown, similar to |
| | | | | asparaginase |
| SEQ ID NO. 1828 | LM-3359.1 | From 2015819 | to 2016538 | Unknown, similar to |
| | | | | unknown proteins |
| SEQ ID NO. 1829 | LM-336.1 | From 119063 | to 119770 | Unknown |
| SEQ ID NO. 1830 | LM-3360.1 | From 2016858 | to 2018261 | Unknown, similar to ATP- |
| | | | | dependent DNA helicase |
| SEQ ID NO. 1831 | LM-3361.2 | From 2018258 | to 2019265 | Unknown, similar to |
| | | | | unknown proteins |
| SEQ ID NO. 1832 | LM-3362.2 | From 2019420 | to 2019644 | Unknown, similar to |
| | | | | ferredoxin |
| SEQ ID NO. 1833 | LM-3363.3 | From 2019686 | to 2020297 | Unknown, similar to |
| | | | | unknown protein |
| SEQ ID NO. 1834 | LM-3364.2 | From 1867802 | to 1869460 | Unknown, similar to |
| | | | | unknown protein |
| SEQ ID NO. 1835 | LM-3371.2 | From 1872724 | to 1873620 | Unknown, similar to protein- |
| | | | | tyrosine phosphatase |
| SEQ ID NO. 1836 | LM-3373.2 | From 1873764 | to 1875116 | Unknown, similar to signal |
| | | | | recognition particle protein |
| | | | | Ffh |
| SEQ ID NO. 1837 | LM-3374.2 | From 1875129 | to 1875461 | Unknown, similar to |
| | | | | unknown proteins |
| SEQ ID NO. 1838 | LM-3375.2 | From 1358834 | to 1359103 | ribosomal protein S15 |
| SEQ ID NO. 1839 | LM-3376.1 | From 1359352 | to 1361523 | Polynucleotide |
| | | | | phosphorylase (PNPase) |
| SEQ ID NO. 1840 | LM-3377.1 | From 1361564 | to 1362604 | unknown, similar to |
| | | | | conserved hypothetical |
| | | | | proteins |
| SEQ ID NO. 1841 | LM-3378.2 | From 1362765 | to 1363244 | unknown, similar to B. subtilis |
| | | | | YqzC protein |
| SEQ ID NO. 1842 | LM-3379.2 | From 1363272 | to 1363628 | unknown, similar to B. subtilis |
| | | | | YqzD protein |
| SEQ ID NO. 1843 | LM-338.1 | From 117841 | to 118956 | Unknown, similar to lipase |
| SEQ ID NO. 1844 | LM-3380.2 | From 1918681 | to 1919505 | unknown, similar to |
| | | | | unknown proteins |
| SEQ ID NO. 1845 | LM-3381.1 | From 1919525 | to 1920436 | unknown, similar to |
| | | | | conserved hypothetical |
| | | | | proteins |
| SEQ ID NO. 1846 | LM-3382.1 | From 1920436 | to 1920900 | unknown, highly similar to |
| | | | | signal peptidase II |
| SEQ ID NO. 1847 | LM-3384.1 | From 1920982 | to 1922265 | unknown, similar to |
| | | | | conserved hypothetical |
| | | | | proteins |
| SEQ ID NO. 1848 | LM-3385.1 | From 1922439 | to 1923809 | unknown, similar to |
| | | | | conserved hypothetical |
| | | | | proteins |
| SEQ ID NO. 1849 | LM-3387.1 | From 1923825 | to 1924757 | unknown, similar to |
| | | | | adhesion binding proteins |
| | | | | and lipoproteins with |
| | | | | multiple specificity for metal |
| | | | | cations |
| SEQ ID NO. 1850 | LM-3389.1 | From 1924754 | to 1925596 | unknown, similar to integral |
| | | | | membrane proteins, ABC |
| | | | | transporter |
| SEQ ID NO. 1851 | LM-3390.3 | From 1925600 | to 1926322 | unknown, similar to |
| | | | | probable ABC transporter, |
| | | | | ATP-binding proteins |
| SEQ ID NO. 1852 | LM-3391.3 | From 262657 | to 263262 | RNA polymerase sigma-30 |
| | | | | factor (sigma-H) |
| SEQ ID NO. 1853 | LM-3392.1 | From 262064 | to 262576 | Unknown, similar to B. subtilis |
| | | | | Yacp protein |
| SEQ ID NO. 1854 | LM-3393.1 | From 261306 | to 262061 | Unknown, similar to |
| | | | | conserved hypothetical |
| | | | | proteins like to B. subtilis |
| | | | | YacO protein |
| SEQ ID NO. 1855 | LM-3394.1 | From 260896 | to 261306 | Unknown, highly similar to |
| | | | | B. subtilis YazC protein |
| SEQ ID NO. 1856 | LM-3398.1 | From 259477 | to 260892 | cysteinyl-tRNA synthetase |
| SEQ ID NO. 1857 | LM-340.1 | From 116972 | to 117805 | Unknown, similar to |
| | | | | transcriptional regulatory |
| | | | | proteins, AraC family |
| SEQ ID NO. 1858 | LM-3400.1 | From 258856 | to 259470 | unknown, similar to serine |
| | | | | O-acetyltransferase |
| SEQ ID NO. 1859 | LM-3403.3 | From 256983 | to 258458 | unknown, highly similar to |
| | | | | glutamyl-tRNA synthetase |
| SEQ ID NO. 1860 | LM-3404.3 | From 256491 | to 256964 | Unknown, similar to B. subtilis |
| | | | | YacN protein |
| SEQ ID NO. 1861 | LM-3405.2 | From 1862459 | to 1862893 | Unknown, similar to |
| | | | | transcription regulator |
| SEQ ID NO. 1862 | LM-3406.2 | From 1862893 | to 1863480 | Unknown, weakly similar to |
| | | | | Nad(P)h Oxidoreductase |
| | | | | chain B |
| SEQ ID NO. 1863 | LM-3407.1 | From 1863501 | to 1864217 | Unknown, similar to |
| | | | | unknown proteins |
| SEQ ID NO. 1864 | LM-3408.1 | From 1864248 | to 1864637 | Unknown |
| SEQ ID NO. 1865 | LM-3409.1 | From 1864657 | to 1865394 | Unknown, similar to E. coli |
| | | | | tRNA (guanine-N1) |
| | | | | methyltransferase |
| SEQ ID NO. 1866 | LM-3410.1 | From 1865394 | to 1865912 | Unknown, similar to putative |
| | | | | 16S rRNA processing |
| | | | | protein RimM |
| SEQ ID NO. 1867 | LM-3411.1 | From 1865922 | to 1866308 | Unknown, similar to |
| | | | | unknown proteins |
| SEQ ID NO. 1868 | LM-3412.1 | From 1866336 | to 1867070 | Unknown, similar to |
| | | | | unknown proteins |
| SEQ ID NO. 1869 | LM-3414.2 | From 1867427 | to 1867699 | ribosomal protein S16 |
| SEQ ID NO. 1870 | LM-3415.4 | From 1723649 | to 1724122 | unknown, some similarity to |
| | | | | hypothetical proteins |
| SEQ ID NO. 1871 | LM-3416.3 | From 1723356 | to 1723598 | unknown, some similarity to |
| | | | | hypothetical proteins |
| SEQ ID NO. 1872 | LM-3417.3 | From 1722431 | to 1723339 | unknown, similar to L- |
| | | | | lactate dehydrogenases |
| SEQ ID NO. 1873 | LM-342.1 | From 115087 | to 116829 | Unknown, ABC transporter, |
| | | | | ATP-binding protein |
| SEQ ID NO. 1874 | LM-3420.4 | From 1716858 | to 1717160 | Unknown |
| SEQ ID NO. 1875 | LM-3421.2 | From 1748792 | to 1749733 | unknown; similar to |
| | | | | glycerate dehydrogenases |
| SEQ ID NO. 1876 | LM-3422.1 | From 1749878 | to 1751176 | glutamate-1-semialdehyde |
| | | | | aminotransferase |
| SEQ ID NO. 1877 | LM-3424.1 | From 1751283 | to 1752371 | unknown, similar to |
| | | | | hypothetical proteins |
| SEQ ID NO. 1878 | LM-3426.1 | From 1752413 | to 1752940 | unknown, similar to |
| | | | | hypothetical proteins |
| SEQ ID NO. 1879 | LM-3427.1 | From 1753095 | to 1753841 | unknown, similar to glucose |
| | | | | 1-dehydrogenase |
| SEQ ID NO. 1880 | LM-3428.1 | From 1753845 | to 1754942 | unknown, similar to A/G- |
| | | | | specific adenine |
| | | | | glycosylase |
| SEQ ID NO. 1881 | LM-3429.1 | From 1755143 | to 1756123 | unknown, similar to |
| | | | | hypothetical proteins |
| SEQ ID NO. 1882 | LM-343.1 | From 113313 | to 115094 | Unknown, similar to ABC |
| | | | | transporter, ATP-binding |
| | | | | protein |
| SEQ ID NO. 1883 | LM-3430.2 | From 1756156 | to 1756617 | unknown, similar to |
| | | | | deoxyuridine triphosphate |
| | | | | nucleotidohydrolases |
| SEQ ID NO. 1884 | LM-3431.2 | From 2891269 | to 2891652 | Unknown, hypothetical |
| | | | | secreted protein |
| SEQ ID NO. 1885 | LM-3432.2 | From 2890779 | to 2891171 | Unknown, hypothetical |
| | | | | secreted protein |
| SEQ ID NO. 1886 | LM-3433.1 | From 2890274 | to 2890666 | Unknown, hypothetical |
| | | | | secreted protein |
| SEQ ID NO. 1887 | LM-3434.1 | From 2888994 | to 2890277 | Unknown |
| SEQ ID NO. 1888 | LM-3436.1 | From 2888639 | to 2889001 | Unknown |
| SEQ ID NO. 1889 | LM-3439.2 | From 2887499 | to 2888215 | GidB protein |
| SEQ ID NO. 1890 | LM-3442.2 | From 885440 | to 886882 | unknown, similar to |
| | | | | Glutamine binding and |
| | | | | transport protein |
| SEQ ID NO. 1891 | LM-3444.1 | From 886875 | to 887603 | unknown, similar to amino |
| | | | | acid ABC transporter, ATP- |
| | | | | binding protein |
| SEQ ID NO. 1892 | LM-3445.2 | From 887652 | to 889502 | Unknown, similar to |
| | | | | amidases |
| SEQ ID NO. 1893 | LM-3447.3 | From 2068977 | to 2069648 | Unknown, similar to |
| | | | | deoxyribose-phosphate |
| | | | | aldolase |
| SEQ ID NO. 1894 | LM-3448.1 | From 2069710 | to 2070657 | Unknown, similar to |
| | | | | transcription repressor of |
| | | | | dra/nupC/pdp operon DeoR |
| SEQ ID NO. 1895 | LM-3449.1 | From 2070754 | to 2071170 | Unknown, similar to PTS |
| | | | | mannose-specific enzyme |
| | | | | IIA component |
| SEQ ID NO. 1896 | LM-345.1 | From 112386 | to 113288 | Unknown, similar to |
| | | | | transcription regulator |
| SEQ ID NO. 1897 | LM-3450.1 | From 2071187 | to 2072182 | Unknown, similar to opine |
| | | | | catabolism protein |
| SEQ ID NO. 1898 | LM-3451.1 | From 2072205 | to 2073269 | Unknown, weakly similar to |
| | | | | glucosamine-fructose-6- |
| | | | | phosphate |
| | | | | aminotransferase |
| SEQ ID NO. 1899 | LM-3452.1 | From 2073282 | to 2074103 | Unknown, similar to |
| | | | | mannose-specific enzyme |
| | | | | IID component |
| SEQ ID NO. 1900 | LM-3453.1 | From 2074084 | to 2074902 | Unknown, similar to PTS |
| | | | | mannose-specific enzyme |
| | | | | IIC component |
| SEQ ID NO. 1901 | LM-3455.1 | From 2074925 | to 2075392 | Unknown, similar to PTS |
| | | | | mannose-specific enzyme |
| | | | | IIB component |
| SEQ ID NO. 1902 | LM-3456.2 | From 2075412 | to 2076113 | Unknown, similar to |
| | | | | transcription regulator GntR |
| | | | | family |
| SEQ ID NO. 1903 | LM-3458.2 | From 2076115 | to 2076846 | Unknown, similar to |
| | | | | transcription regulator GntR |
| | | | | family |
| SEQ ID NO. 1904 | LM-3459.2 | From 607372 | to 608199 | Unknown, similar histidinol |
| | | | | phosphate phosphatase |
| SEQ ID NO. 1905 | LM-3460.1 | From 608184 | to 608480 | Unknown, similar to |
| | | | | methyltransferase |
| SEQ ID NO. 1906 | LM-3461.1 | From 608557 | to 609588 | Unknown |
| SEQ ID NO. 1907 | LM-3462.2 | From 609629 | to 610924 | Unknown, conserved |
| | | | | hypothetical protein |
| SEQ ID NO. 1908 | LM-3463.2 | From 1776257 | to 1776829 | Unknown |
| SEQ ID NO. 1909 | LM-3465.1 | From 1774991 | to 1775983 | unknown, similar to cell- |
| | | | | shape determining proteins |
| SEQ ID NO. 1910 | LM-3466.1 | From 1773514 | to 1774773 | unknown, similar to |
| | | | | multidrug resistance protein, |
| | | | | integral membrane protein |
| SEQ ID NO. 1911 | LM-3468.3 | From 1772178 | to 1773410 | unknown, highly similar to |
| | | | | aminopeptidases |
| SEQ ID NO. 1912 | LM-3469.2 | From 833117 | to 833587 | Unknown |
| SEQ ID NO. 1913 | LM-3473.1 | From 831025 | to 833073 | Unknown, similar to putative |
| | | | | Na+/H+ antiporter |
| SEQ ID NO. 1914 | LM-3475.1 | From 830259 | to 830897 | Unknown, weakly similar to |
| | | | | GTP-pyrophosphokinase |
| SEQ ID NO. 1915 | LM-3479.2 | From 827666 | to 828016 | Unknown, similar to B. subtilis |
| | | | | YqkB protein |
| SEQ ID NO. 1916 | LM-3480.3 | From 826752 | to 827513 | Unknown |
| SEQ ID NO. 1917 | LM-3481.2 | From 2011128 | to 2012438 | Unknown, similar to |
| | | | | unknown protein |
| SEQ ID NO. 1918 | LM-3482.1 | From 2010089 | to 2011105 | Unknown, similar to |
| | | | | NAD(P)H-dependent |
| | | | | glycerol-3-phosphate |
| | | | | dehydrogenase |
| SEQ ID NO. 1919 | LM-3483.2 | From 2009006 | to 2009986 | Unknown, similar to protein- |
| | | | | tyrosine/serine phosphatase |
| SEQ ID NO. 1920 | LM-3484.1 | From 2008319 | to 2008594 | Unknown, similar to non- |
| | | | | specific DNA-binding |
| | | | | protein HU |
| SEQ ID NO. 1921 | LM-3485.1 | From 2007515 | to 2008084 | Unknown, similar to GTP |
| | | | | cyclohydrolase I |
| SEQ ID NO. 1922 | LM-3486.1 | From 2006689 | to 2007456 | Unknown, similar to |
| | | | | heptaprenyl diphosphate |
| | | | | synthase component I |
| SEQ ID NO. 1923 | LM-3487.1 | From 2005953 | to 2006666 | Unknown, similar to 2- |
| | | | | heptaprenyl-1,4- |
| | | | | naphthoquinone |
| | | | | methyltransferase |
| SEQ ID NO. 1924 | LM-3488.1 | From 2004977 | to 2005942 | Unknown, similar to |
| | | | | heptaprenyl diphosphate |
| | | | | synthase component II |
| | | | | (menaquinone biosynthesis) |
| SEQ ID NO. 1925 | LM-3489.2 | From 2004515 | to 2004958 | Unknown, similar to |
| | | | | nucleoside diphosphate |
| | | | | kinase |
| SEQ ID NO. 1926 | LM-349.1 | From 110013 | to 112283 | Unknown, highly similar to |
| | | | | chitinase B |
| SEQ ID NO. 1927 | LM-3490.2 | From 1029208 | to 1029819 | unknown, similar to |
| | | | | hypothetical protein |
| SEQ ID NO. 1928 | LM-3491.1 | From 1029965 | to 1030756 | Unknown |
| SEQ ID NO. 1929 | LM-3493.3 | From 1030757 | to 1032229 | unknown, similar to |
| | | | | PHYTOENE |
| | | | | DEHYDROGENASE |
| | | | | (EC 1.3.—.—) (PHYTOENE |
| | | | | DESATURASE) |
| SEQ ID NO. 1930 | LM-3494.3 | From 1032333 | to 1032617 | Unknown, similar to B. subtilis |
| | | | | protein YkvS |
| SEQ ID NO. 1931 | LM-3495.3 | From 1032924 | to 1033190 | PHOSPHOCARRIER |
| | | | | PROTEIN HPR |
| | | | | (HISTIDINE-CONTAINING |
| | | | | PROTEIN). |
| SEQ ID NO. 1932 | LM-3497.4 | From 1033190 | to 1034908 | Phosphotransferase system |
| | | | | enzyme I |
| SEQ ID NO. 1933 | LM-3498.1 | From 1035021 | to 1036055 | Unknown, conserved |
| | | | | hypothetical protein |
| SEQ ID NO. 1934 | LM-35.1 | From 2735279 | to 2735953 | Unknown, similar to |
| | | | | ribulose-5-phosphate 3- |
| | | | | epimerase |
| SEQ ID NO. 1935 | LM-3500.1 | From 1036068 | to 1036928 | Unknown, similar to 3- |
| | | | | hydroxyisobutyrate |
| | | | | dehydrogenase (B. subtilis |
| | | | | YkwC protein) |
| SEQ ID NO. 1936 | LM-3501.2 | From 1036971 | to 1038116 | Unknown, similar to |
| | | | | aminotransferases (to B. subtilis |
| | | | | PatA protein) |
| SEQ ID NO. 1937 | LM-3504.2 | From 641208 | to 642308 | Unknown, similar to cell |
| | | | | surface protein |
| SEQ ID NO. 1938 | LM-3505.1 | From 642414 | to 642914 | Unknown, weakly similar to |
| | | | | transcription regulator |
| SEQ ID NO. 1939 | LM-3506.1 | From 642962 | to 643348 | Unknown |
| SEQ ID NO. 1940 | LM-3507.1 | From 643400 | to 643744 | Unknown, similar to B. subtilis |
| | | | | YvlA protein |
| SEQ ID NO. 1941 | LM-3508.2 | From 643891 | to 645231 | Unknown, conserved |
| | | | | hypothetical membrane |
| | | | | protein |
| SEQ ID NO. 1942 | LM-351.2 | From 109349 | to 109720 | Unknown |
| SEQ ID NO. 1943 | LM-3510.2 | From 2145652 | to 2146044 | Unknown |
| SEQ ID NO. 1944 | LM-3511.1 | From 2146089 | to 2146298 | Unknown |
| SEQ ID NO. 1945 | LM-3512.1 | From 2146449 | to 2147426 | Unknown, similar to |
| | | | | conjugated bile acid |
| | | | | hydrolase |
| SEQ ID NO. 1946 | LM-3514.2 | From 2147684 | to 2149312 | Class I heat-shock protein |
| | | | | (chaperonin) GroEL |
| SEQ ID NO. 1947 | LM-3517.2 | From 1888615 | to 1890273 | Unknown, similar to |
| | | | | unknown proteins |
| SEQ ID NO. 1948 | LM-3518.1 | From 1887913 | to 1888575 | Unknown, similar to |
| | | | | phosphoglycerate |
| | | | | dehydrogenase |
| SEQ ID NO. 1949 | LM-3519.1 | From 1886887 | to 1887777 | Unknown, similar to L- |
| | | | | serine dehydratase |
| SEQ ID NO. 1950 | LM-352.2 | From 108624 | to 109256 | Unknown, similar to NADH |
| | | | | oxidase |
| SEQ ID NO. 1951 | LM-3520.2 | From 1884846 | to 1886894 | Unknown, similar to ATP- |
| | | | | dependent DNA helicase |
| | | | | recG |
| SEQ ID NO. 1952 | LM-3523.1 | From 2143109 | to 2144734 | Unknown, similar to copper |
| | | | | export proteins |
| SEQ ID NO. 1953 | LM-3524.1 | From 2142480 | to 2143097 | Unknown, similar to |
| | | | | unknown protein |
| SEQ ID NO. 1954 | LM-3525.1 | From 2141820 | to 2142461 | Unknown, similar to |
| | | | | unknown protein |
| SEQ ID NO. 1955 | LM-3527.1 | From 2141071 | to 2141814 | Unknown, similar to |
| | | | | potassium channel subunit |
| SEQ ID NO. 1956 | LM-3528.2 | From 2140046 | to 2140963 | Unknown, similar to heme O |
| | | | | oxygenase |
| SEQ ID NO. 1957 | LM-353.1 | From 108320 | to 108610 | Unknown |
| SEQ ID NO. 1958 | LM-3533.1 | From 1053426 | to 1054277 | unknown |
| SEQ ID NO. 1959 | LM-3534.1 | From 1054319 | to 1055284 | Unknown, similar to B. subtilis |
| | | | | LytR protein |
| SEQ ID NO. 1960 | LM-3535.1 | From 1055393 | to 1057060 | Unknown, similar to |
| | | | | conserved hypothetical |
| | | | | proteins (in particular B. subtilis |
| | | | | YkqC) |
| SEQ ID NO. 1961 | LM-3537.1 | From 1057761 | to 1058531 | Unknown, similar to |
| | | | | conserved hypothetical |
| | | | | proteins |
| SEQ ID NO. 1962 | LM-3538.3 | From 1058580 | to 1059608 | Unknown, similar to |
| | | | | transcriptional regulator, |
| | | | | LacI family |
| SEQ ID NO. 1963 | LM-3539.1 | From 2286839 | to 2287183 | Unknown |
| SEQ ID NO. 1964 | LM-354.1 | From 107915 | to 108208 | Unknown, similar to |
| | | | | transcription regulator |
| SEQ ID NO. 1965 | LM-3541.1 | From 2287518 | to 2288513 | Tryptophanyl-tRNA |
| | | | | synthetase |
| SEQ ID NO. 1966 | LM-3543.1 | From 2288571 | to 2288987 | Unknown, similar to |
| | | | | unknown protein |
| SEQ ID NO. 1967 | LM-3544.1 | From 2288971 | to 2289423 | Unknown, similar to |
| | | | | transcription regulator |
| SEQ ID NO. 1968 | LM-3547.1 | From 2289545 | to 2290786 | Unknown, similar to 3- |
| | | | | oxoacyl-acyl-carrier protein |
| | | | | synthase |
| SEQ ID NO. 1969 | LM-3549.2 | From 2290989 | to 2291927 | Unknown, similar to 3- |
| | | | | oxoacyl-acyl-carrier protein |
| | | | | synthase |
| SEQ ID NO. 1970 | LM-355.1 | From 107499 | to 107849 | Unknown |
| SEQ ID NO. 1971 | LM-3551.1 | From 1242100 | to 1244508 | Phenylalanyl-tRNA |
| | | | | synthetase beta subunit |
| SEQ ID NO. 1972 | LM-3553.2 | From 1241048 | to 1242100 | Phenylalanyl-tRNA |
| | | | | synthetase beta subunit |
| SEQ ID NO. 1973 | LM-3555.2 | From 2305632 | to 2305994 | Unknown, similar to |
| | | | | unknown protein |
| SEQ ID NO. 1974 | LM-3556.1 | From 2305180 | to 2305602 | Unknown, similar to |
| | | | | histidine triad (HIT) protein |
| SEQ ID NO. 1975 | LM-3557.1 | From 2304267 | to 2305019 | Unknown, similar to ABC |
| | | | | transporter (ATP-binding |
| | | | | protein) |
| SEQ ID NO. 1976 | LM-3558.1 | From 2303060 | to 2304283 | Unknown, similar to ABC |
| | | | | transporter (membrane |
| | | | | protein) |
| SEQ ID NO. 1977 | LM-3559.1 | From 2302518 | to 2303021 | Unknown, similar to |
| | | | | unknown protein |
| SEQ ID NO. 1978 | LM-356.1 | From 106988 | to 107377 | unknown |
| SEQ ID NO. 1979 | LM-3560.1 | From 2301260 | to 2302321 | Unknown, similar to |
| | | | | uroporphyrinogen III |
| | | | | decarboxylase |
| SEQ ID NO. 1980 | LM-3561.1 | From 2300334 | to 2301263 | Unknown, similar to |
| | | | | ferrochelatase |
| SEQ ID NO. 1981 | LM-3562.2 | From 2299833 | to 2300177 | Unknown |
| SEQ ID NO. 1982 | LM-3563.2 | From 1548034 | to 1548456 | Unknown, similar to |
| | | | | unknown protein |
| SEQ ID NO. 1983 | LM-3565.2 | From 1548701 | to 1549906 | Unknown, similar to |
| | | | | ammonium transporter |
| | | | | NrgA |
| SEQ ID NO. 1984 | LM-3566.1 | From 1549920 | to 1550285 | Unknown, similar to |
| | | | | nitrogen regulatory PII |
| | | | | protein |
| SEQ ID NO. 1985 | LM-3567.1 | From 1550435 | to 1550815 | Unknown |
| SEQ ID NO. 1986 | LM-3569.1 | From 1550854 | to 1552629 | Aspartyl-tRNA synthetase |
| SEQ ID NO. 1987 | LM-357.1 | From 105951 | to 106862 | Unknown, similar to PTS |
| | | | | system mannose-specific |
| | | | | factor IID |
| SEQ ID NO. 1988 | LM-3570.2 | From 1552632 | to 1553909 | Histidyl-tRNA synthetase |
| SEQ ID NO. 1989 | LM-3571.4 | From 1713234 | to 1715099 | Unknown, similar to |
| | | | | asparagine synthetase |
| SEQ ID NO. 1990 | LM-3572.1 | From 1712634 | to 1713209 | Unknown, similar to |
| | | | | conserved hypothetical |
| | | | | protein |
| SEQ ID NO. 1991 | LM-3573.2 | From 1711672 | to 1712637 | Unknown, similar to |
| | | | | conserved hypothetical |
| | | | | proteins |
| SEQ ID NO. 1992 | LM-3574.3 | From 896003 | to 897028 | Unknown, similar to |
| | | | | transcription regulator lacl |
| | | | | family |
| SEQ ID NO. 1993 | LM-3576.1 | From 895278 | to 895991 | Unknown, similar to |
| | | | | carboxylesterase |
| SEQ ID NO. 1994 | LM-3577.1 | From 893838 | to 895211 | UDP-N- |
| | | | | acetylmuramoylalanyl-D- |
| | | | | glutamyl-2,6- |
| | | | | diaminopimelate-D-alanyl- |
| | | | | D-alanyl ligase |
| SEQ ID NO. 1995 | LM-3578.1 | From 892662 | to 893774 | D-alanine-D-alanine ligase |
| SEQ ID NO. 1996 | LM-3579.1 | From 892192 | to 892512 | Unknown, similar to E. coli |
| | | | | SugE protein |
| | | | | (transmembrane |
| | | | | chaperone) |
| SEQ ID NO. 1997 | LM-358.1 | From 105123 | to 105929 | Unknown, similar to PTS |
| | | | | system mannose-specific, |
| | | | | factor IIC |
| SEQ ID NO. 1998 | LM-3581.1 | From 891848 | to 892189 | Unknown, similar to E. coli |
| | | | | SugE protein |
| | | | | (transmembrane |
| | | | | chaperone) |
| SEQ ID NO. 1999 | LM-3582.1 | From 891277 | to 891831 | Unknown, similar to |
| | | | | transcription regulator |
| | | | | TetR/AcrR family |
| SEQ ID NO. 2000 | LM-3583.3 | From 890439 | to 891197 | Unknown |
| SEQ ID NO. 2001 | LM-3585.2 | From 1926935 | to 1928425 | Unknown, similar to |
| | | | | carboxy-terminal processing |
| | | | | proteinase |
| SEQ ID NO. 2002 | LM-3588.1 | From 1928798 | to 1931011 | Unknown, similar to heavy |
| | | | | metal-transporting ATPases |
| SEQ ID NO. 2003 | LM-3589.1 | From 1931026 | to 1931319 | Unknown, similar to |
| | | | | conserved hypothetical |
| | | | | proteins |
| SEQ ID NO. 2004 | LM-359.1 | From 104134 | to 105099 | Unknown, similar to PTS |
| | | | | system mannose-specific, |
| | | | | factor IIAB |
| SEQ ID NO. 2005 | LM-3590.2 | From 1931442 | to 1932266 | Unknown, similar to similar |
| | | | | to D-alanyl-D-alanine |
| | | | | carboxypeptidases |
| SEQ ID NO. 2006 | LM-3591.3 | From 1932324 | to 1933025 | Purine nucleoside |
| | | | | phosphorylase |
| SEQ ID NO. 2007 | LM-3592.2 | From 2487261 | to 2488337 | Unknown |
| SEQ ID NO. 2008 | LM-3593.1 | From 2488379 | to 2489209 | Unknown, conserved |
| | | | | lipoprotein |
| SEQ ID NO. 2009 | LM-3596.1 | From 2489274 | to 2489948 | Unknown, similar to ABC |
| | | | | transporter, permease |
| | | | | protein |
| SEQ ID NO. 2010 | LM-3597.1 | From 2489945 | to 2490967 | Unknown, similar to ABC |
| | | | | transporter (ATP-binding |
| | | | | protein) |
| SEQ ID NO. 2011 | LM-3599.1 | From 2491552 | to 2492694 | Unknown, similar to two- |
| | | | | component sensor histidine |
| | | | | kinase |
| SEQ ID NO. 2012 | LM-36.1 | From 2735962 | to 2736402 | Unknown, similar to ribose |
| | | | | 5-phosphate epimerase |
| SEQ ID NO. 2013 | LM-360.1 | From 103204 | to 103836 | unknown |
| SEQ ID NO. 2014 | LM-3600.1 | From 2492684 | to 2493379 | Unknown, similar to two- |
| | | | | component response |
| | | | | regulator |
| SEQ ID NO. 2015 | LM-3601.3 | From 2493454 | to 2494329 | Unknown, conserved |
| | | | | hypothetical protein |
| SEQ ID NO. 2016 | LM-3602.2 | From 1435635 | to 1437866 | Pyruvate-formate lyase |
| SEQ ID NO. 2017 | LM-3603.1 | From 1437943 | to 1438689 | Pyruvate-formate lyase |
| | | | | activating enzyme |
| SEQ ID NO. 2018 | LM-3604.1 | From 1438724 | to 1439254 | Unknown, similar to |
| | | | | unknown proteins |
| SEQ ID NO. 2019 | LM-3605.2 | From 1439421 | to 1440614 | Unknown, similar to |
| | | | | multidrug-efflux transporter |
| SEQ ID NO. 2020 | LM-3608.2 | From 1104863 | to 1105864 | Unknown, similar to |
| | | | | TEICHOIC ACID |
| | | | | TRANSLOCATION ATP- |
| | | | | BINDING PROTEIN TAGH |
| | | | | (ABC transporter) |
| SEQ ID NO. 2021 | LM-361.1 | From 102468 | to 103028 | unknown |
| SEQ ID NO. 2022 | LM-3612.1 | From 1107975 | to 1109663 | Unknown, similar to |
| | | | | TEICHOIC ACID |
| | | | | BIOSYNTHESIS PROTEIN |
| | | | | B PRECURSOR |
| SEQ ID NO. 2023 | LM-3613.1 | From 1109705 | to 1110577 | Unknown, similar to putative |
| | | | | UDP-glucose |
| | | | | pyrophosphorylases |
| SEQ ID NO. 2024 | LM-3614.3 | From 1110769 | to 1113627 | Unknown, similar to B. subtilis |
| | | | | YfhO protein |
| SEQ ID NO. 2025 | LM-3615.2 | From 1277312 | to 1278025 | Unknown, similar to |
| | | | | transcription regulator GntR |
| | | | | family |
| SEQ ID NO. 2026 | LM-3616.1 | From 1278056 | to 1279702 | Unknown, similar to |
| | | | | alpha, alpha- |
| | | | | phosphotrehalase |
| SEQ ID NO. 2027 | LM-3617.3 | From 1279721 | to 1281205 | Unknown, similar to PTS |
| | | | | system trehalose specific |
| | | | | enzyme IIBC |
| SEQ ID NO. 2028 | LM-3618.3 | From 1434661 | to 1435209 | Unknown, similar to putative |
| | | | | anti-terminator regulatory |
| | | | | protein |
| SEQ ID NO. 2029 | LM-362.1 | From 102155 | to 102478 | Unknown, similar to ATP |
| | | | | synthase epsilon chain |
| SEQ ID NO. 2030 | LM-3620.2 | From 1432839 | to 1434644 | DNA mismatch repair |
| | | | | protein |
| SEQ ID NO. 2031 | LM-3623.1 | From 1430237 | to 1432819 | DNA mismatch repair |
| | | | | (recognition) |
| SEQ ID NO. 2032 | LM-3624.2 | From 1429765 | to 1430127 | Unknown, similar to B. subtilis |
| | | | | YmcA protein |
| SEQ ID NO. 2033 | LM-3625.2 | From 758656 | to 759396 | Unknown, similar to |
| | | | | riboflavin kinase/FAD |
| | | | | synthase |
| SEQ ID NO. 2034 | LM-3626.2 | From 756738 | to 758543 | Unknown, similar to L- |
| | | | | glutamine-D-fructose-6- |
| | | | | phosphate |
| | | | | amidotransferase |
| SEQ ID NO. 2035 | LM-3627.2 | From 598020 | to 598925 | Unknown, putative |
| | | | | membrane protein |
| SEQ ID NO. 2036 | LM-3628.2 | From 598968 | to 600344 | Unknown, similar to NADP- |
| | | | | specific glutamate |
| | | | | dehydrogenase |
| SEQ ID NO. 2037 | LM-363.1 | From 100772 | to 102142 | Unknown, similar to ATP |
| | | | | synthase beta chain |
| SEQ ID NO. 2038 | LM-3630.4 | From 134782 | to 136290 | Unknown, similar to inosine |
| | | | | monophosphate |
| | | | | dehydrogenase |
| SEQ ID NO. 2039 | LM-3631.2 | From 133961 | to 134710 | Unknown, conserved |
| | | | | hypothetical protein |
| SEQ ID NO. 2040 | LM-3632.2 | From 2292047 | to 2293174 | Unknown, similar to N- |
| | | | | acetylmuramoyl-L-alanine |
| | | | | amidase and to internalin B |
| SEQ ID NO. 2041 | LM-3633.1 | From 2293775 | to 2294464 | Unknown, similar to |
| | | | | phosphoglyceromutase 1 |
| SEQ ID NO. 2042 | LM-3635.2 | From 2294555 | to 2297155 | Unknown, similar to |
| | | | | endopeptidase Clp ATP- |
| | | | | binding chain B (ClpB) |
| SEQ ID NO. 2043 | LM-3636.2 | From 1281321 | to 1281773 | unknown |
| SEQ ID NO. 2044 | LM-3637.1 | From 1281820 | to 1282284 | unknown |
| SEQ ID NO. 2045 | LM-3638.1 | From 1282473 | to 1283393 | unknown |
| SEQ ID NO. 2046 | LM-3639.1 | From 1283413 | to 1284660 | Gamma-glutamyl phosphate |
| | | | | reductase |
| SEQ ID NO. 2047 | LM-364.1 | From 99902 | to 100771 | Unknown, similar to ATP |
| | | | | synthase gamma chain |
| SEQ ID NO. 2048 | LM-3640.1 | From 1284644 | to 1285474 | Gamma-glutamyl kinase |
| SEQ ID NO. 2049 | LM-3643.3 | From 1285610 | to 1286749 | unknown |
| SEQ ID NO. 2050 | LM-3644.4 | From 1286830 | to 1287225 | Unknown, similar to |
| | | | | transcriptional regulator |
| | | | | (phage-related) |
| SEQ ID NO. 2051 | LM-3645.2 | From 1765915 | to 1767294 | unknown, similar to similar |
| | | | | to RNA methyltransferases |
| SEQ ID NO. 2052 | LM-3647.1 | From 1765499 | to 1765900 | unknown, similar to |
| | | | | glutathione transferase - |
| | | | | fosfomycin resistance |
| | | | | protein |
| SEQ ID NO. 2053 | LM-3648.1 | From 1765117 | to 1765470 | unknown |
| SEQ ID NO. 2054 | LM-3649.1 | From 1763941 | to 1764843 | unknown, some similarities |
| | | | | to methyl-accepting |
| | | | | chemotaxis proteins |
| SEQ ID NO. 2055 | LM-3650.1 | From 1763209 | to 1763751 | unknown, similar to |
| | | | | ribosomal-protein-alanine |
| | | | | N-acetyltransferase |
| SEQ ID NO. 2056 | LM-3652.2 | From 1762200 | to 1763165 | unknown, similar to putative |
| | | | | transmembrane proteins |
| SEQ ID NO. 2057 | LM-3656.2 | From 2840286 | to 2841896 | Unknown, similar to ABC |
| | | | | transporter (ATP-binding |
| | | | | protein) |
| SEQ ID NO. 2058 | LM-3657.2 | From 2839698 | to 2840228 | Unknown, similar to |
| | | | | unknown protein |
| SEQ ID NO. 2059 | LM-3658.1 | From 1595227 | to 1597149 | threonyl-tRNA synthetase |
| SEQ ID NO. 2060 | LM-3659.1 | From 1597499 | to 1598422 | primosome component |
| | | | | (helicase loader) Dnal |
| SEQ ID NO. 2061 | LM-366.1 | From 98409 | to 99905 | Unknown, similar to ATP |
| | | | | synthase alpha chain |
| SEQ ID NO. 2062 | LM-3660.2 | From 1598432 | to 1599808 | chromosome replication |
| | | | | initiation/membrane |
| | | | | attachment protein DnaB |
| SEQ ID NO. 2063 | LM-3662.3 | From 2708276 | to 2709358 | Unknown, conserved |
| | | | | hypothetical lipoprotein |
| SEQ ID NO. 2064 | LM-3663.2 | From 2707235 | to 2708194 | Unknown, weakly similar to |
| | | | | E. coli MenA protein |
| SEQ ID NO. 2065 | LM-3664.1 | From 2706415 | to 2707215 | Unknown, similar to B. subtilis |
| | | | | YbaF protein |
| SEQ ID NO. 2066 | LM-3666.1 | From 2705746 | to 2706054 | ribosomal protein S10 |
| SEQ ID NO. 2067 | LM-3667.1 | From 2705082 | to 2705711 | ribosomal protein L3 |
| SEQ ID NO. 2068 | LM-3668.1 | From 2704433 | to 2705056 | ribosomal protein L4 |
| SEQ ID NO. 2069 | LM-3669.1 | From 2704149 | to 2704433 | ribosomal protein L23 |
| SEQ ID NO. 2070 | LM-367.1 | From 97381 | to 98412 | Unknown, weakly similar to |
| | | | | ATP synthase delta chain |
| SEQ ID NO. 2071 | LM-3671.2 | From 2703275 | to 2704108 | ribosomal protein L2 |
| SEQ ID NO. 2072 | LM-3673.2 | From 2033587 | to 2034528 | Unknown, similar to |
| | | | | ferrichrome binding protein |
| SEQ ID NO. 2073 | LM-3674.1 | From 2032460 | to 2033485 | Unknown, similar to |
| | | | | ferrichrome ABC transporter |
| | | | | (permease) |
| SEQ ID NO. 2074 | LM-3676.2 | From 2031438 | to 2032460 | Unknown, similar to |
| | | | | ferrichrome ABC transporter |
| | | | | (permease) |
| SEQ ID NO. 2075 | LM-3677.2 | From 1756864 | to 1757673 | unknown, similar to |
| | | | | hypothetical proteins |
| SEQ ID NO. 2076 | LM-3678.1 | From 1757771 | to 1758673 | unknown, similar to CDP- |
| | | | | abequose synthase |
| SEQ ID NO. 2077 | LM-3679.2 | From 1758694 | to 1761291 | unknown, similar to putative |
| | | | | membrane proteins |
| SEQ ID NO. 2078 | LM-368.1 | From 97127 | to 97369 | Unknown, similar to ATP |
| | | | | synthase C chain |
| SEQ ID NO. 2079 | LM-3680.2 | From 1761318 | to 1761992 | unknown, similar to |
| | | | | unknown proteins |
| SEQ ID NO. 2080 | LM-3681.2 | From 1708312 | to 1708518 | unknown |
| SEQ ID NO. 2081 | LM-3684.3 | From 1708857 | to 1711268 | leucyl-tRNA synthetase |
| SEQ ID NO. 2082 | LM-3692.1 | From 2161161 | to 2162054 | Unknown |
| SEQ ID NO. 2083 | LM-3693.1 | From 2160538 | to 2161164 | unknown |
| SEQ ID NO. 2084 | LM-3694.1 | From 2160043 | to 2160432 | Unknown, similar to |
| | | | | unknown protein |
| SEQ ID NO. 2085 | LM-3695.2 | From 980177 | to 981307 | Unknown, similar to B. subtilis |
| | | | | ComEC protein |
| SEQ ID NO. 2086 | LM-3696.1 | From 981743 | to 982960 | unknown, hypothetical |
| | | | | transport protein |
| SEQ ID NO. 2087 | LM-3697.2 | From 982957 | to 983646 | unknown, similar to |
| | | | | transcription regulator |
| SEQ ID NO. 2088 | LM-3698.2 | From 983768 | to 984814 | unknown, conserved |
| | | | | hypothetical membrane |
| | | | | protein |
| SEQ ID NO. 2089 | LM-3699.2 | From 2658024 | to 2658851 | Unknown, conserved |
| | | | | hypothetical protein |
| SEQ ID NO. 2090 | LM-370.1 | From 94764 | to 97070 | unknown |
| SEQ ID NO. 2091 | LM-3701.3 | From 1936764 | to 1937603 | unknown, similar to |
| | | | | hypothetical proteins |
| SEQ ID NO. 2092 | LM-3703.3 | From 1935964 | to 1936749 | unknown, similar to |
| | | | | hypothetical proteins |
| SEQ ID NO. 2093 | LM-3704.3 | From 1935334 | to 1935948 | unknown, similar to |
| | | | | hypothetical proteins |
| SEQ ID NO. 2094 | LM-3705.1 | From 1934765 | to 1935298 | unknown, similar to peptidyl |
| | | | | methionine sulfoxide |
| | | | | reductases |
| SEQ ID NO. 2095 | LM-3706.1 | From 1934321 | to 1934758 | unknown, similar to |
| | | | | transcriptional regulator |
| | | | | (PilB family) |
| SEQ ID NO. 2096 | LM-3707.3 | From 1933333 | to 1934238 | unknown, similar to |
| | | | | dehydogenases and |
| | | | | hypothetical proteins |
| SEQ ID NO. 2097 | LM-3708.2 | From 822611 | to 823531 | Unknown, conserved |
| | | | | hypothetical protein |
| SEQ ID NO. 2098 | LM-3709.1 | From 821886 | to 822527 | Unknown, similar to B. subtilis |
| | | | | YwnB protein |
| SEQ ID NO. 2099 | LM-3710.1 | From 821070 | to 821771 | Unknown, similar to |
| | | | | conserved hypothetical |
| | | | | protein |
| SEQ ID NO. 2100 | LM-3711.3 | From 820145 | to 821035 | Unknown, similar to |
| | | | | conserved hypothetical |
| | | | | protein |
| SEQ ID NO. 2101 | LM-3712.2 | From 1767359 | to 1767739 | unknown, similar to |
| | | | | conserved hypothetical |
| | | | | proteins |
| SEQ ID NO. 2102 | LM-3713.1 | From 1767846 | to 1768490 | unknown, similar to |
| | | | | deoxyguanosine |
| | | | | kinase/deoxyadenosine |
| | | | | kinase(I) subunit |
| SEQ ID NO. 2103 | LM-3714.1 | From 1768520 | to 1769389 | unknown, similar to |
| | | | | transport proteins |
| SEQ ID NO. 2104 | LM-3715.1 | From 1769720 | to 1770526 | unknown, similar to |
| | | | | aminoglycoside N3- |
| | | | | acetyltransferases |
| SEQ ID NO. 2105 | LM-3716.2 | From 1770648 | to 1771406 | unknown, similar to |
| | | | | methionine |
| | | | | aminopeptidases |
| SEQ ID NO. 2106 | LM-3717.2 | From 1818007 | to 1818516 | Unknown |
| SEQ ID NO. 2107 | LM-3718.1 | From 1817112 | to 1817879 | Unknown, similar to ABC |
| | | | | transporter (ATP-binding |
| | | | | protein) |
| SEQ ID NO. 2108 | LM-3719.3 | From 1815143 | to 1817122 | Unknown, similar to ABC |
| | | | | transporter (permease) |
| SEQ ID NO. 2109 | LM-3720.2 | From 1293088 | to 1293654 | unknown, similar to type-I |
| | | | | signal peptidase |
| SEQ ID NO. 2110 | LM-3722.1 | From 1291710 | to 1292969 | ATP-dependent Clp |
| | | | | protease ATP-binding |
| | | | | subunit ClpX |
| SEQ ID NO. 2111 | LM-3724.1 | From 1290241 | to 1291524 | trigger factor (prolyl |
| | | | | isomerase) |
| SEQ ID NO. 2112 | LM-3725.2 | From 1289188 | to 1290126 | unknown |
| SEQ ID NO. 2113 | LM-3726.3 | From 1703330 | to 1703824 | unknown, putative cell |
| | | | | surface protein |
| SEQ ID NO. 2114 | LM-3727.1 | From 1704618 | to 1705181 | unknown, similar to |
| | | | | unknown proteins |
| SEQ ID NO. 2115 | LM-3728.1 | From 1705199 | to 1705630 | unknown |
| SEQ ID NO. 2116 | LM-373.1 | From 88888 | to 94767 | Unknown |
| SEQ ID NO. 2117 | LM-3732.2 | From 1706204 | to 1707088 | similar to translation |
| | | | | elongation factor |
| SEQ ID NO. 2118 | LM-3733.3 | From 1707168 | to 1707917 | 30S ribosomal protein S2 |
| SEQ ID NO. 2119 | LM-3735.3 | From 1645412 | to 1645936 | Unknown, similar to general |
| | | | | stress protein |
| SEQ ID NO. 2120 | LM-3736.3 | From 1644106 | to 1645191 | 3-deoxy-D-arabino- |
| | | | | heptulosonate 7-phosphate |
| | | | | synthase |
| SEQ ID NO. 2121 | LM-3737.1 | From 1642865 | to 1643872 | catabolite control protein A |
| SEQ ID NO. 2122 | LM-3739.2 | From 1641284 | to 1642543 | tyrosyl-tRNA synthetase |
| SEQ ID NO. 2123 | LM-374.1 | From 88121 | to 88810 | unknown |
| SEQ ID NO. 2124 | LM-3746.2 | From 1428442 | to 1428939 | Unknown, similar to N- |
| | | | | acetyltransferase |
| SEQ ID NO. 2125 | LM-3747.1 | From 1426766 | to 1428328 | Unknown, similar to |
| | | | | unknown protein |
| SEQ ID NO. 2126 | LM-3749.2 | From 1425419 | to 1426465 | Recombination protein recA |
| SEQ ID NO. 2127 | LM-375.1 | From 86747 | to 87730 | Unknown, similar to |
| | | | | oxidoreductases |
| SEQ ID NO. 2128 | LM-3750.2 | From 356890 | to 357705 | Unknown, similar to |
| | | | | transposase |
| SEQ ID NO. 2129 | LM-3754.2 | From 360172 | to 360507 | Unknown |
| SEQ ID NO. 2130 | LM-3756.2 | From 1407859 | to 1408818 | Unknown, similar to |
| | | | | unknown protein |
| SEQ ID NO. 2131 | LM-3757.2 | From 1406742 | to 1407818 | Unknown, similar to |
| | | | | unknown protein |
| SEQ ID NO. 2132 | LM-3758.2 | From 824936 | to 826396 | Unknown, similar to lysine- |
| | | | | specific permease |
| SEQ ID NO. 2133 | LM-3759.2 | From 824423 | to 824884 | Unknown |
| SEQ ID NO. 2134 | LM-376.1 | From 86323 | to 86691 | Unknown, similar to |
| | | | | transcription regulator |
| | | | | (merR family) |
| SEQ ID NO. 2135 | LM-3763.1 | From 1659457 | to 1660926 | Unknown, similar to |
| | | | | multidrug-efflux transporter |
| SEQ ID NO. 2136 | LM-3764.1 | From 1660923 | to 1661363 | Unknown, similar to |
| | | | | transcription regulator MarR |
| | | | | family |
| SEQ ID NO. 2137 | LM-3766.3 | From 1661588 | to 1662457 | D-Amino Acid |
| | | | | Aminotransferase |
| SEQ ID NO. 2138 | LM-3767.2 | From 2212384 | to 2212620 | unknown |
| SEQ ID NO. 2139 | LM-3768.2 | From 2213218 | to 2215041 | Unknown, similar to |
| | | | | unknown protein |
| SEQ ID NO. 2140 | LM-3769.2 | From 2306177 | to 2306716 | Unknown |
| SEQ ID NO. 2141 | LM-377.1 | From 85902 | to 86228 | Unknown |
| SEQ ID NO. 2142 | LM-3770.2 | From 2306833 | to 2307714 | Unknown, similar to post- |
| | | | | translocation molecular |
| | | | | chaperone |
| SEQ ID NO. 2143 | LM-3772.2 | From 2307755 | to 2308696 | Unknown, similar to S. aureus |
| | | | | Cbf1 protein |
| SEQ ID NO. 2144 | LM-3774.3 | From 991810 | to 992865 | unknown, similar to |
| | | | | UNDECAPRENYL- |
| | | | | PHOSPHATE N- |
| | | | | ACETYLGLUCOSAMINYL |
| | | | | TRANSFERASE |
| SEQ ID NO. 2145 | LM-3775.1 | From 990968 | to 991690 | unknown, similar to |
| | | | | transcription regulator |
| | | | | (GntR family) |
| SEQ ID NO. 2146 | LM-3776.2 | From 990248 | to 990952 | GLUCOSAMINE-6- |
| | | | | PHOSPHATE ISOMERASE |
| | | | | (EC 5.3.1.10) |
| | | | | (GLUCOSAMINE-6- |
| | | | | PHOSPHATE |
| | | | | DEAMINASE) (GNPDA) |
| | | | | (GLCN6P DEAMINASE). |
| SEQ ID NO. 2147 | LM-3778.2 | From 1861907 | to 1862251 | ribosomal protein L19 |
| SEQ ID NO. 2148 | LM-3779.3 | From 1860200 | to 1861090 | internalin C |
| SEQ ID NO. 2149 | LM-378.1 | From 85025 | to 85627 | Unknown |
| SEQ ID NO. 2150 | LM-3783.2 | From 989099 | to 990232 | N- |
| | | | | ACETYLGLUCOSAMINE-6- |
| | | | | PHOSPHATE |
| | | | | DEACETYLASE (EC |
| | | | | 3.5.1.25) (GLCNAC 6-P |
| | | | | DEACETYLASE). |
| SEQ ID NO. 2151 | LM-3785.2 | From 988065 | to 988910 | unknown |
| SEQ ID NO. 2152 | LM-379.1 | From 84451 | to 84849 | Unknown |
| SEQ ID NO. 2153 | LM-3790.3 | From 1420076 | to 1421362 | Unknown, similar to putative |
| | | | | protease |
| SEQ ID NO. 2154 | LM-3791.2 | From 1778415 | to 1779482 | unknown, similar to |
| | | | | hypothetical proteins |
| SEQ ID NO. 2155 | LM-3792.1 | From 1777763 | to 1778338 | unknown, similar to putative |
| | | | | transcription regulators |
| SEQ ID NO. 2156 | LM-3793.2 | From 1776910 | to 1777578 | unknown, similar to |
| | | | | hypothetical proteins |
| SEQ ID NO. 2157 | LM-3795.3 | From 1421454 | to 1422185 | Unknown, similar to 3- |
| | | | | ketoacyl-acyl carrier protein |
| | | | | reductase |
| SEQ ID NO. 2158 | LM-3797.2 | From 1422236 | to 1423165 | Unknown, similar to |
| | | | | unknown protein |
| SEQ ID NO. 2159 | LM-3798.1 | From 1423255 | to 1423833 | Unknown, similar to |
| | | | | phosphatidylglycerophosphate |
| | | | | synthase |
| SEQ ID NO. 2160 | LM-380.1 | From 82959 | to 84437 | Unknown |
| SEQ ID NO. 2161 | LM-3800.3 | From 1423902 | to 1425146 | Unknown, similar to |
| | | | | competence-damage |
| | | | | inducible protein CinA |
| SEQ ID NO. 2162 | LM-3801.3 | From 984823 | to 985722 | unknown |
| SEQ ID NO. 2163 | LM-3802.4 | From 985743 | to 986564 | unknown |
| SEQ ID NO. 2164 | LM-3806.3 | From 1578625 | to 1579425 | unknown, highly similar to |
| | | | | cell division inhibitor |
| | | | | (septum placement) protein |
| | | | | MinD |
| SEQ ID NO. 2165 | LM-3807.3 | From 1577212 | to 1578573 | Unknown, similar to |
| | | | | ribonuclease G |
| SEQ ID NO. 2166 | LM-3808.2 | From 2298927 | to 2299712 | Unknown |
| SEQ ID NO. 2167 | LM-3809.2 | From 2298093 | to 2298863 | Unknown, similar to |
| | | | | unknown protein |
| SEQ ID NO. 2168 | LM-3810.3 | From 333534 | to 335195 | Unknown, similar to |
| | | | | unknown protein |
| SEQ ID NO. 2169 | LM-3811.3 | From 335350 | to 336426 | Unknown |
| SEQ ID NO. 2170 | LM-3812.3 | From 1662570 | to 1663982 | Unknown, similar to Xaa-His |
| | | | | dipeptidase |
| SEQ ID NO. 2171 | LM-3818.1 | From 2211280 | to 2212245 | Unknown, similar to |
| | | | | transcription regulator, Lacl |
| | | | | family |
| SEQ ID NO. 2172 | LM-3819.1 | From 2210609 | to 2211244 | Unknown |
| SEQ ID NO. 2173 | LM-382.1 | From 81661 | to 82617 | Unknown, similar to |
| | | | | phosphoglycerate |
| | | | | dehydrogenase |
| SEQ ID NO. 2174 | LM-3821.1 | From 2159697 | to 2160053 | Unknown, similar to |
| | | | | unknown protein |
| SEQ ID NO. 2175 | LM-3822.1 | From 2149348 | to 2149632 | class I heat-shock protein |
| | | | | (chaperonin) GroES |
| SEQ ID NO. 2176 | LM-3823.3 | From 2943120 | to 2943479 | ribonuclease P protein |
| | | | | component |
| SEQ ID NO. 2177 | LM-3825.4 | From 2943871 | to 2944341 | hypothetical protein |
| SEQ ID NO. 2178 | LM-3826.1 | From 1240358 | to 1240681 | unknown, similar to |
| | | | | unknown protein |
| SEQ ID NO. 2179 | LM-383.1 | From 80892 | to 81530 | Unknown, conserved |
| | | | | hypothetical protein |
| SEQ ID NO. 2180 | LM-3845.2 | From 979762 | to 980064 | unknown, similar to B. subtilis |
| | | | | YneR protein |
| SEQ ID NO. 2181 | LM-3846.1 | From 979059 | to 979529 | non-heme iron-binding |
| | | | | ferritin |
| SEQ ID NO. 2182 | LM-3847.1 | From 940316 | to 940696 | unknown, conserved |
| | | | | hypothetical protein |
| SEQ ID NO. 2183 | LM-3848.1 | From 1357753 | to 1358697 | unknown, highly similar to |
| | | | | riboflavin kinase and FAD |
| | | | | synthase |
| SEQ ID NO. 2184 | LM-385.1 | From 79817 | to 80869 | Unknown, similar to E. coli |
| | | | | Ada protein (O6- |
| | | | | methylguanine-DNA |
| | | | | methyltransferase) |
| SEQ ID NO. 2185 | LM-3851.1 | From 1378840 | to 1379901 | Unknown, similar to |
| | | | | aminopeptidase P |
| SEQ ID NO. 2186 | LM-3853.2 | From 501693 | to 501959 | Unknown, weakly similar to |
| | | | | transposase |
| SEQ ID NO. 2187 | LM-3856.2 | From 1953836 | to 1954237 | unknown, similar to similar |
| | | | | to RNase HI |
| SEQ ID NO. 2188 | LM-3857.1 | From 1963240 | to 1963605 | unknown, similar to |
| | | | | conserved hypothetical |
| | | | | proteins |
| SEQ ID NO. 2189 | LM-3858.2 | From 2030744 | to 2031196 | Unknown, similar to |
| | | | | transcriptional regulator (Fur |
| | | | | family) |
| SEQ ID NO. 2190 | LM-386.1 | From 79047 | to 79820 | Unknown, similar to |
| | | | | carboxyphosphonoenol- |
| | | | | pyruvate phosphonomutase |
| SEQ ID NO. 2191 | LM-3863.2 | From 2494891 | to 2495268 | Unknown, similar to glycine |
| | | | | cleavage system protein H |
| SEQ ID NO. 2192 | LM-3865.2 | From 200094 | to 200402 | Unknown, similar to B. subtilis |
| | | | | SpoVG protein |
| SEQ ID NO. 2193 | LM-3867.1 | From 1890288 | to 1890653 | Unknown, similar to |
| | | | | unknown protein |
| SEQ ID NO. 2194 | LM-3868.2 | From 1428945 | to 1429748 | Unknown, conserved |
| | | | | hypothetical protein |
| SEQ ID NO. 2195 | LM-3869.2 | From 1440748 | to 1441296 | Unknown |
| SEQ ID NO. 2196 | LM-387.1 | From 78362 | to 78811 | Unknown |
| SEQ ID NO. 2197 | LM-3871.1 | From 2100845 | to 2101366 | Unknown, similar to |
| | | | | unknown protein |
| SEQ ID NO. 2198 | LM-3872.1 | From 2100224 | to 2100751 | Unknown, similar to cell- |
| | | | | division initiation protein |
| | | | | (septum placement) |
| SEQ ID NO. 2199 | LM-3873.1 | From 2891649 | to 2892032 | Unknown, hypothetical |
| | | | | secreted protein |
| SEQ ID NO. 2200 | LM-3876.1 | From 520961 | to 521536 | Unknown |
| SEQ ID NO. 2201 | LM-3878.2 | From 640625 | to 641215 | Unknown |
| SEQ ID NO. 2202 | LM-3879.2 | From 640300 | to 640632 | Unknown, conserved |
| | | | | hypothetical protein |
| SEQ ID NO. 2203 | LM-388.1 | From 78090 | to 78374 | unknown |
| SEQ ID NO. 2204 | LM-3883.1 | From 1664057 | to 1664470 | Unknown, weakly similar to |
| | | | | E. coli MutT protein (dGTP |
| | | | | pyrophosphohydrolase) |
| SEQ ID NO. 2205 | LM-3886.1 | From 1702695 | to 1703315 | unknown, putative |
| | | | | cellsurface protein |
| SEQ ID NO. 2206 | LM-3887.1 | From 1038336 | to 1038557 | unknown |
| SEQ ID NO. 2207 | LM-3889.1 | From 2524168 | to 2524911 | Unknown, similar to |
| | | | | carboxylesterase |
| SEQ ID NO. 2208 | LM-389.1 | From 77149 | to 77406 | unknown |
| SEQ ID NO. 2209 | LM-3890.1 | From 2523835 | to 2524068 | Unknown |
| SEQ ID NO. 2210 | LM-3891.1 | From 1724196 | to 1724462 | unknown, similar to |
| | | | | conserved hypothetical |
| | | | | proteins |
| SEQ ID NO. 2211 | LM-3893.1 | From 611240 | to 612634 | Unknown, similar to beta- |
| | | | | glucosidase |
| SEQ ID NO. 2212 | LM-3896.1 | From 1546608 | to 1547885 | Unknown, similar to |
| | | | | unknown protein |
| SEQ ID NO. 2213 | LM-3897.3 | From 1514257 | to 1515288 | Unknown, similar to |
| | | | | unknown protein |
| SEQ ID NO. 2214 | LM-3898.1 | From 1594535 | to 1595119 | Unknown, similar to |
| | | | | hypothetical GTP binding |
| | | | | protein |
| SEQ ID NO. 2215 | LM-39.1 | From 2736597 | to 2737628 | Unknown, similar to polyol |
| | | | | dehydrogenase |
| SEQ ID NO. 2216 | LM-390.3 | From 76262 | to 76984 | unknown |
| SEQ ID NO. 2217 | LM-3902.4 | From 1715236 | to 1716435 | Unknown, similar to S- |
| | | | | methionine |
| | | | | adenosyltransferase |
| SEQ ID NO. 2218 | LM-3904.3 | From 819389 | to 820039 | Unknown |
| SEQ ID NO. 2219 | LM-3905.2 | From 502899 | to 504629 | Unknown |
| SEQ ID NO. 2220 | LM-3907.1 | From 1234779 | to 1235330 | unknown |
| SEQ ID NO. 2221 | LM-3908.1 | From 1234465 | to 1234776 | unknown, similar to |
| | | | | unknown protein |
| SEQ ID NO. 2222 | LM-3910.2 | From 1409070 | to 1409996 | Unknown, similar to |
| | | | | unknown protein |
| SEQ ID NO. 2223 | LM-3912.1 | From 2709522 | to 2710421 | Unknown, conserved |
| | | | | lipoprotein |
| SEQ ID NO. 2224 | LM-3914.1 | From 2297304 | to 2297981 | Unknown, similar to |
| | | | | unknown protein |
| SEQ ID NO. 2225 | LM-3915.1 | From 2145127 | to 2145513 | Unknown, similar to large |
| | | | | conductance |
| | | | | mechanosensitive channel |
| | | | | protein |
| SEQ ID NO. 2226 | LM-392.3 | From 75832 | to 76125 | unknown |
| SEQ ID NO. 2227 | LM-3922.2 | From 987735 | to 988049 | Unknown |
| SEQ ID NO. 2228 | LM-3924.2 | From 986722 | to 987180 | Unknown |
| SEQ ID NO. 2229 | LM-3929.1 | From 833615 | to 834076 | unknown |
| SEQ ID NO. 2230 | LM-393.3 | From 75342 | to 75665 | Unknown |
| SEQ ID NO. 2231 | LM-3934.1 | From 356567 | to 356872 | Unknown, similar to |
| | | | | transposase |
| SEQ ID NO. 2232 | LM-3942.3 | From 2633930 | to 2634850 | Unknown, conserved |
| | | | | hypothetical protein |
| SEQ ID NO. 2233 | LM-3943.4 | From 1576107 | to 1576397 | ribosomal protein L27 |
| SEQ ID NO. 2234 | LM-3944.4 | From 1576411 | to 1576728 | Unknown, similar to |
| | | | | unknown protein |
| SEQ ID NO. 2235 | LM-3947.1 | From 1599814 | to 1600278 | Unknown, similar to |
| | | | | unknown protein |
| SEQ ID NO. 2236 | LM-3949.2 | From 1638420 | to 1638908 | Unknown, similar to |
| | | | | unknown protein |
| SEQ ID NO. 2237 | LM-395.2 | From 74239 | to 75228 | Unknown, similar to |
| | | | | dinitrogenase reductase |
| | | | | ADP-ribosylation system |
| SEQ ID NO. 2238 | LM-3950.2 | From 1639120 | to 1639722 | ribosomal protein S4 |
| SEQ ID NO. 2239 | LM-3951.1 | From 1640225 | to 1641004 | Unknown |
| SEQ ID NO. 2240 | LM-3953.1 | From 502424 | to 502660 | Hypothetical orf |
| SEQ ID NO. 2241 | LM-3954.2 | From 504674 | to 504997 | Unknown |
| SEQ ID NO. 2242 | LM-3955.1 | From 1307763 | to 1308170 | unknown, conserved |
| | | | | hypothetical protein, similar |
| | | | | to B. subtilis YneT protein |
| SEQ ID NO. 2243 | LM-3957.1 | From 2360908 | to 2361141 | Unknown |
| SEQ ID NO. 2244 | LM-3958.1 | From 2360435 | to 2360713 | Unknown, similar to |
| | | | | competence transcription |
| | | | | factor ComK, N terminal |
| | | | | part |
| SEQ ID NO. 2245 | LM-3959.2 | From 2359948 | to 2360184 | Unknown |
| SEQ ID NO. 2246 | LM-396.2 | From 1859272 | to 1859787 | translation initiation factor |
| | | | | IF-3 |
| SEQ ID NO. 2247 | LM-3961.1 | From 2494522 | to 2494806 | Unknown, similar to |
| | | | | thioredoxin |
| SEQ ID NO. 2248 | LM-3966.4 | From 1739674 | to 1740849 | unknown, similar to |
| | | | | transmembrane transport |
| | | | | proteins |
| SEQ ID NO. 2249 | LM-397.3 | From 1858651 | to 1859010 | ribosomal protein L20 |
| SEQ ID NO. 2250 | LM-3970.1 | From 1933037 | to 1933270 | unknown, similar to |
| | | | | hypothetical protein |
| SEQ ID NO. 2251 | LM-3972.2 | From 818789 | to 819265 | Unknown, similar to |
| | | | | transcription regulator |
| | | | | (EbsC from Enterococcus |
| | | | | faecalis) |
| SEQ ID NO. 2252 | LM-3973.2 | From 1136900 | to 1137400 | Unknown, similar to |
| | | | | lipoprotein signal peptidase |
| SEQ ID NO. 2253 | LM-3976.4 | From 267530 | to 267916 | Unknown, similar to |
| | | | | repressor (penicilinase |
| | | | | repressor) |
| SEQ ID NO. 2254 | LM-3978.3 | From 267010 | to 267372 | ribosomal protein L12 |
| SEQ ID NO. 2255 | LM-3979.3 | From 266431 | to 266931 | ribosomal protein L10 |
| SEQ ID NO. 2256 | LM-398.1 | From 1857856 | to 1858611 | Unknown, similar to 3-exodeoxyribonuclease |
| | | | | exoA |
| SEQ ID NO. 2257 | LM-3981.1 | From 2361897 | to 2362274 | protein gp30 [Bacteriophage |
| | | | | A118] |
| SEQ ID NO. 2258 | LM-3982.1 | From 2362306 | to 2362656 | protein gp29 [Bacteriophage |
| | | | | A118] |
| SEQ ID NO. 2259 | LM-3984.1 | From 270372 | to 270977 | Unknown, conserved |
| | | | | hypothetical protein |
| SEQ ID NO. 2260 | LM-399.1 | From 1857242 | to 1857772 | Unknown |
| SEQ ID NO. 2261 | LM-3990.1 | From 222983 | to 223261 | Unknown, highly similar to |
| | | | | B. subtilis YabO protein |
| SEQ ID NO. 2262 | LM-3993.1 | From 200522 | to 200830 | Unknown, similar to B. subtilis |
| | | | | SpoVG protein |
| SEQ ID NO. 2263 | LM-3995.1 | From 143016 | to 143258 | unknown |
| SEQ ID NO. 2264 | LM-3998.1 | From 823638 | to 824168 | Unknown, conserved |
| | | | | hypothetical protein |
| SEQ ID NO. 2265 | LM-3999.3 | From 810985 | to 811620 | Unknown, similar to acyl- |
| | | | | carrier protein |
| | | | | phosphodiesterase and to |
| | | | | NAD(P)H dehydrogenase |
| SEQ ID NO. 2266 | LM-4.1 | From 2713398 | to 2713940 | Unknown |
| SEQ ID NO. 2267 | LM-40.1 | From 2737630 | to 2738682 | Unknown, similar to sorbitol |
| | | | | dehydrogenase |
| SEQ ID NO. 2268 | LM-4003.2 | From 1513917 | to 1514171 | ribosomal protein S20 |
| SEQ ID NO. 2269 | LM-401.1 | From 1855952 | to 1857184 | Unknown, similar to |
| | | | | aminotripeptidase |
| | | | | (peptidase T) |
| SEQ ID NO. 2270 | LM-4013.2 | From 1926482 | to 1926898 | unknown, similar to |
| | | | | transcriptional regulator |
| | | | | (MarR family) |
| SEQ ID NO. 2271 | LM-4015.1 | From 1771594 | to 1772040 | unknown, similar to putative |
| | | | | flavodoxin |
| SEQ ID NO. 2272 | LM-402.1 | From 1855571 | to 1855933 | Unknown |
| SEQ ID NO. 2273 | LM-4027.2 | From 263535 | to 263714 | unknown, highly similar to |
| | | | | preprotein translocase |
| | | | | subunit |
| SEQ ID NO. 2274 | LM-4029.2 | From 263844 | to 264377 | transcription antitermination |
| | | | | factor |
| SEQ ID NO. 2275 | LM-403.1 | From 1854748 | to 1855521 | Unknown, similar to ABC |
| | | | | transporter (ATP-binding |
| | | | | protein) |
| SEQ ID NO. 2276 | LM-4031.1 | From 264432 | to 264902 | Unknown |
| SEQ ID NO. 2277 | LM-4032.1 | From 265029 | to 265454 | ribosomal protein L11 |
| SEQ ID NO. 2278 | LM-4033.1 | From 265494 | to 266183 | ribosomal protein L1 |
| SEQ ID NO. 2279 | LM-404.1 | From 1854077 | to 1854682 | Unknown, similar to |
| | | | | unknown protein |
| SEQ ID NO. 2280 | LM-4040.1 | From 504972 | to 505277 | Unknown |
| SEQ ID NO. 2281 | LM-4041.1 | From 552563 | to 552931 | Unknown, similar to |
| | | | | unknown protein |
| SEQ ID NO. 2282 | LM-4053.1 | From 1270465 | to 1270725 | unknown |
| SEQ ID NO. 2283 | LM-4055.2 | From 1288261 | to 1288926 | unknown, weakly similar to |
| | | | | oligopeptide ABC |
| | | | | transporter AppA |
| SEQ ID NO. 2284 | LM-4058.1 | From 1405945 | to 1406226 | Unknown |
| SEQ ID NO. 2285 | LM-4059.1 | From 1406366 | to 1406713 | Unknown |
| SEQ ID NO. 2286 | LM-4065.1 | From 2045765 | to 2046046 | Unknown, similar to pentitol |
| | | | | PTS system enzyme II B |
| | | | | component |
| SEQ ID NO. 2287 | LM-4082.1 | From 2782739 | to 2782894 | Unknown |
| SEQ ID NO. 2288 | LM-4083.1 | From 2780577 | to 2780798 | Unknown |
| SEQ ID NO. 2289 | LM-4084.1 | From 2780392 | to 2780574 | Unknown |
| SEQ ID NO. 2290 | LM-4088.1 | From 2701254 | to 2701445 | ribosomal protein L29 |
| SEQ ID NO. 2291 | LM-4089.1 | From 2700963 | to 2701226 | ribosomal protein S17 |
| SEQ ID NO. 2292 | LM-4090.1 | From 2699383 | to 2699568 | ribosomal protein S14 |
| SEQ ID NO. 2293 | LM-4091.1 | From 2697267 | to 2697446 | ribosomal protein L30 |
| SEQ ID NO. 2294 | LM-4096.1 | From 367248 | to 367532 | Unknown |
| SEQ ID NO. 2295 | LM-4097.1 | From 370416 | to 370634 | Unknown |
| SEQ ID NO. 2296 | LM-4098.1 | From 389538 | to 389717 | Unknown, similar to |
| | | | | conserved hypothetical |
| | | | | protein |
| SEQ ID NO. 2297 | LM-4099.1 | From 401386 | to 401580 | unknown |
| SEQ ID NO. 2298 | LM-41.1 | From 2738719 | to 2739990 | Unknown, similar to PTS |
| | | | | system galactitol-specific |
| | | | | enzyme IIC component |
| SEQ ID NO. 2299 | LM-4106.1 | From 439009 | to 439212 | Unknown, similar to putative |
| | | | | transcription regulator |
| SEQ ID NO. 2300 | LM-4113.1 | From 521601 | to 521771 | ribosomal protein L32 |
| SEQ ID NO. 2301 | LM-4115.1 | From 616742 | to 616951 | Unknown, similar to |
| | | | | unknown protein |
| SEQ ID NO. 2302 | LM-4118.1 | From 669086 | to 669361 | Unknown |
| SEQ ID NO. 2303 | LM-4119.1 | From 696606 | to 696815 | unknown |
| SEQ ID NO. 2304 | LM-4120.1 | From 707310 | to 707486 | unknown |
| SEQ ID NO. 2305 | LM-4121.1 | From 709601 | to 709810 | unknown |
| SEQ ID NO. 2306 | LM-4122.1 | From 731765 | to 732001 | Unknown, weakly similar to |
| | | | | flagellar switch protein |
| SEQ ID NO. 2307 | LM-4123.1 | From 756079 | to 756291 | unknown, LPXTG motif |
| | | | | protein |
| SEQ ID NO. 2308 | LM-4124.1 | From 756494 | to 756637 | Hypothetical CDS |
| SEQ ID NO. 2309 | LM-4130.1 | From 890069 | to 890215 | Unknown, hypothetical |
| | | | | protein |
| SEQ ID NO. 2310 | LM-4134.1 | From 961203 | to 961469 | Unknown, similar to ABC |
| | | | | transporter, ATP-binding |
| | | | | protein (C-terminal part) |
| SEQ ID NO. 2311 | LM-4135.1 | From 973509 | to 973670 | unknown |
| SEQ ID NO. 2312 | LM-4137.1 | From 981317 | to 981544 | unknown |
| SEQ ID NO. 2313 | LM-4139.1 | From 987274 | to 987501 | Unknown |
| SEQ ID NO. 2314 | LM-4142.1 | From 1003593 | to 1003829 | D-alanyl carrier protein |
| SEQ ID NO. 2315 | LM-4144.1 | From 1057067 | to 1057276 | unknown, similar to B. subtilis |
| | | | | YkzG protein |
| SEQ ID NO. 2316 | LM-4147.1 | From 1133466 | to 1133696 | unknown, highly similar to |
| | | | | TN916 ORF8 |
| SEQ ID NO. 2317 | LM-4148.1 | From 1145723 | to 1145944 | unknown, highly similar to |
| | | | | TN916 ORF19 |
| SEQ ID NO. 2318 | LM-4149.2 | From 1154864 | to 1156381 | unknown |
| SEQ ID NO. 2319 | LM-415.1 | From 1848166 | to 1848690 | Unknown, similar to |
| | | | | unknown protein |
| SEQ ID NO. 2320 | LM-4150.1 | From 1188014 | to 1188289 | Unknown, similar to |
| | | | | carboxysome structural |
| | | | | protein |
| SEQ ID NO. 2321 | LM-4152.2 | From 1287376 | to 1287591 | unknown, similar to |
| | | | | transcriptional regulator |
| SEQ ID NO. 2322 | LM-4153.1 | From 1331439 | to 1331666 | unknown, similar to B. subtilis |
| | | | | YnzC protein |
| SEQ ID NO. 2323 | LM-4154.1 | From 1363826 | to 1363975 | ribosomal protein L33 |
| SEQ ID NO. 2324 | LM-4155.1 | From 1366220 | to 1366432 | unknown similar to B. subtilis |
| | | | | yqgQ |
| SEQ ID NO. 2325 | LM-4157.1 | From 1385704 | to 1385931 | Unknown, similar to |
| | | | | exodeoxyribonuclease small |
| | | | | subunit |
| SEQ ID NO. 2326 | LM-4158.1 | From 1387014 | to 1387214 | similar to cold shock protein |
| SEQ ID NO. 2327 | LM-4161.1 | From 1501881 | to 1502054 | 30S ribosomal protein S21 |
| SEQ ID NO. 2328 | LM-4162.2 | From 1576747 | to 1577055 | ribosomal protein L21 |
| SEQ ID NO. 2329 | LM-4166.1 | From 1654691 | to 1654909 | Unknown, hypothetical gene |
| SEQ ID NO. 2330 | LM-417.1 | From 1847472 | to 1847960 | hosphoribosylaminoimidazole |
| | | | | carboxylase I |
| SEQ ID NO. 2331 | LM-4172.1 | From 1756629 | to 1756862 | unknown |
| SEQ ID NO. 2332 | LM-4174.1 | From 1764871 | to 1765077 | unknown |
| SEQ ID NO. 2333 | LM-4175.1 | From 1769479 | to 1769700 | unknown |
| SEQ ID NO. 2334 | LM-4179.1 | From 1859050 | to 1859250 | ribosomal protein L35 |
| SEQ ID NO. 2335 | LM-418.1 | From 1846355 | to 1847479 | Phosphoribosylaminoimidazole |
| | | | | carboxylase II |
| SEQ ID NO. 2336 | LM-4180.1 | From 1867180 | to 1867410 | Unknown, similar to |
| | | | | unknown protein |
| SEQ ID NO. 2337 | LM-4181.1 | From 1881041 | to 1881274 | Unknown, highly similar to |
| | | | | acyl carrier proteins |
| SEQ ID NO. 2338 | LM-4182.1 | From 1890951 | to 1891139 | ribosomal protein L28 |
| SEQ ID NO. 2339 | LM-4183.1 | From 1902281 | to 1902484 | unknown |
| SEQ ID NO. 2340 | LM-4184.1 | From 1928579 | to 1928785 | unknown, similar to putative |
| | | | | mercuric ion binding |
| | | | | proteins |
| SEQ ID NO. 2341 | LM-4186.1 | From 1953513 | to 1953713 | similar to cold shock protein |
| SEQ ID NO. 2342 | LM-4189.1 | From 2094877 | to 2095077 | similar to major cold-shock |
| | | | | protein |
| SEQ ID NO. 2343 | LM-419.1 | From 1845044 | to 1846336 | adenylosuccinate lyase |
| SEQ ID NO. 2344 | LM-4192.1 | From 2144874 | to 2145065 | unknown |
| SEQ ID NO. 2345 | LM-4193.1 | From 2150556 | to 2150759 | unknown |
| SEQ ID NO. 2346 | LM-4195.1 | From 2184120 | to 2184347 | Unknown |
| SEQ ID NO. 2347 | LM-4197.1 | From 2192379 | to 2192609 | Unknown |
| SEQ ID NO. 2348 | LM-420.1 | From 1844250 | to 1844963 | Phosphoribosylaminoimidazole |
| | | | | succinocarboxamide |
| | | | | synthetase |
| SEQ ID NO. 2349 | LM-4200.1 | From 2234357 | to 2234533 | unknown |
| SEQ ID NO. 2350 | LM-4201.1 | From 2242097 | to 2242282 | unknown, similar to B. subtilis |
| | | | | YwmG protein |
| SEQ ID NO. 2351 | LM-4203.1 | From 2293497 | to 2293685 | Unknown, similar to |
| | | | | unknown protein |
| SEQ ID NO. 2352 | LM-4206.1 | From 2346593 | to 2346784 | unknown, |
| SEQ ID NO. 2353 | LM-4207.1 | From 2361582 | to 2361791 | unknown |
| SEQ ID NO. 2354 | LM-4208.1 | From 2366288 | to 2366446 | protein gp22 [Bacteriophage |
| | | | | A118] |
| SEQ ID NO. 2355 | LM-4209.1 | From 2387499 | to 2387663 | Bacteriophage A118 gp65 |
| | | | | protein |
| SEQ ID NO. 2356 | LM-421.1 | From 1843993 to | 1844238 | Unknown, similar to |
| | | | | unknown protein |
| SEQ ID NO. 2357 | LM-4210.1 | From 2388528 | to 2388710 | Hypothetical protein |
| SEQ ID NO. 2358 | LM-4211.1 | From 2389208 | to 2389387 | Unknown |
| SEQ ID NO. 2359 | LM-4212.1 | From 2389491 | to 2389658 | unknown |
| SEQ ID NO. 2360 | LM-4213.1 | From 2391020 | to 2391217 | Unknown |
| SEQ ID NO. 2361 | LM-4214.1 | From 2394790 | to 2394984 | Unknown |
| SEQ ID NO. 2362 | LM-4215.1 | From 2395586 | to 2395801 | gp44 [Bacteriophage A118] |
| SEQ ID NO. 2363 | LM-4216.1 | From 2398287 | to 2398529 | Unknown, similar to |
| | | | | transcription regulator |
| SEQ ID NO. 2364 | LM-422.1 | From 1843306 | to 1843989 | Unknown, similar to |
| | | | | phosphoribosylformylglycinamidine |
| | | | | synthetase II |
| SEQ ID NO. 2365 | LM-4225.1 | From 2467388 | to 2467621 | Unknown, similar to B. subtilis |
| | | | | YuzB protein |
| SEQ ID NO. 2366 | LM-4226.1 | From 2468545 | to 2468703 | Unknown |
| SEQ ID NO. 2367 | LM-4227.1 | From 2480325 | to 2480528 | Unknown, similar to |
| | | | | repressor protein |
| SEQ ID NO. 2368 | LM-4228.1 | From 2501306 | to 2501470 | Unknown |
| SEQ ID NO. 2369 | LM-423.1 | From 1841094 | to 1843313 | Phosphoribosylformylglycinamidine |
| | | | | synthetase I |
| SEQ ID NO. 2370 | LM-4230.1 | From 2559617 | to 2559817 | Unknown, similar to B. subtilis |
| | | | | yvlC protein |
| SEQ ID NO. 2371 | LM-4231.1 | From 2567696 | to 2567935 | Unknown, similar to B. subtilis |
| | | | | CsbA protein |
| SEQ ID NO. 2372 | LM-4233.1 | From 2611192 | to 2611410 | unknown, highly similar to |
| | | | | H+-transporting ATP |
| | | | | synthase chain c |
| SEQ ID NO. 2373 | LM-4234.1 | From 2624633 | to 2624878 | ribosomal protein L31 |
| SEQ ID NO. 2374 | LM-4235.1 | From 2643753 | to 2643938 | Unknown, similar to 4- |
| | | | | oxalocrotonate isomerase |
| SEQ ID NO. 2375 | LM-4236.1 | From 2646464 | to 2646664 | unknown |
| SEQ ID NO. 2376 | LM-4246.1 | From 145354 | to 145560 | Unknown, hypothetical |
| | | | | protein |
| SEQ ID NO. 2377 | LM-4247.1 | From 145085 | to 145171 | Unknown, hypothetical |
| | | | | protein |
| SEQ ID NO. 2378 | LM-4248.1 | From 136714 | to 136992 | Unknown, similar to E. coli |
| | | | | YjdJ protein |
| SEQ ID NO. 2379 | LM-4249.1 | From 136469 | to 136702 | Unknown, similar to E. coli |
| | | | | YjdI protein |
| SEQ ID NO. 2380 | LM-425.1 | From 1839682 | to 1841109 | glutamine |
| | | | | phosphoribosylpyrophosphate |
| | | | | amidotransferase |
| SEQ ID NO. 2381 | LM-4251.1 | From 77863 | to 78066 | Unknown, Hypothetical |
| SEQ ID NO. 2382 | LM-4253.1 | From 52373 | to 52534 | Unknown |
| SEQ ID NO. 2383 | LM-4254.1 | From 50514 | to 50753 | 30S ribosomal protein S18 |
| SEQ ID NO. 2384 | LM-426.1 | From 1838614 | to 1839663 | Phosphoribosylaminoimidazole |
| | | | | synthetase |
| SEQ ID NO. 2385 | LM-4262.2 | From 267909 | to 268949 | Unknown, similar to |
| | | | | penicillinase antirepressor |
| SEQ ID NO. 2386 | LM-4267.1 | From 1153010 | to 1153783 | unknown, similar to |
| | | | | regulatory proteins |
| SEQ ID NO. 2387 | LM-4268.1 | From 1153848 | to 1154204 | unknown |
| SEQ ID NO. 2388 | LM-427.1 | From 1838051 | to 1838617 | unknown, highly similar to |
| | | | | phosphoribosylglycinamide |
| | | | | formyltransferases |
| SEQ ID NO. 2389 | LM-4276.2 | From 2943569 | to 2943703 | ribosomal protein L34 |
| SEQ ID NO. 2390 | LM-4277.1 | From 2693947 | to 2694060 | ribosomal protein L36 |
| SEQ ID NO. 2391 | LM-428.1 | From 1836516 | to 1838045 | Bifunctional |
| | | | | phosphoribosylaminoimidazole |
| | | | | carboxyformyl |
| | | | | formyltransferase and |
| | | | | inosine-monophosphate |
| | | | | cyclohydrolase |
| SEQ ID NO. 2392 | LM-429.1 | From 1835229 | to 1836491 | phosphoribosylglycinamide |
| | | | | synthetase |
| SEQ ID NO. 2393 | LM-4293.1 | From 2130228 | to 2130401 | ribosomal protein L32 |
| SEQ ID NO. 2394 | LM-4295.1 | From 2052696 | to 2052833 | Unknown |
| SEQ ID NO. 2395 | LM-43.1 | From 2740052 | to 2740333 | Unknown, similar to PTS |
| | | | | system galactitol-specific |
| | | | | enzyme IIB component |
| SEQ ID NO. 2396 | LM-430.1 | From 1834795 | to 1835091 | Unknown, similar to |
| | | | | unknown protein |
| SEQ ID NO. 2397 | LM-432.1 | From 1834523 | to 1834777 | Unknown |
| SEQ ID NO. 2398 | LM-433.1 | From 1833125 | to 1834480 | Unknown, similar to putative |
| | | | | sodium-dependent |
| | | | | transporter |
| SEQ ID NO. 2399 | LM-4342.1 | From 2317644 | to 2317841 | Unknown, similar to |
| | | | | unknown protein |
| SEQ ID NO. 2400 | LM-4349.1 | From 1287710 | to 1288243 | Unknown |
| SEQ ID NO. 2401 | LM-435.1 | From 1832242 | to 1832919 | Unknown, similar to |
| | | | | unknown protein |
| SEQ ID NO. 2402 | LM-4352.1 | From 436161 | to 436352 | Unknown |
| SEQ ID NO. 2403 | LM-4353.1 | From 2250846 | to 2251004 | Unknown |
| SEQ ID NO. 2404 | LM-4358.1 | From 2491285 | to 2491473 | unknown |
| SEQ ID NO. 2405 | LM-4359.1 | From 2173635 | to 2173832 | |
| SEQ ID NO. 2406 | LM-436.2 | From 1829982 | to 1832177 | ATP-dependent DNA |
| | | | | helicase |
| SEQ ID NO. 2407 | LM-4360.1 | From 263366 | to 263515 | |
| SEQ ID NO. 2408 | LM-438.1 | From 1827941 | to 1829956 | Unknown, similar to DNA |
| | | | | ligase |
| SEQ ID NO. 2409 | LM-439.1 | From 1826829 | to 1827944 | Unknown, similar to |
| | | | | unknown protein |
| SEQ ID NO. 2410 | LM-44.1 | From 2740390 | to 2740854 | Unknown, similar to PTS |
| | | | | system galactitol-specific |
| | | | | enzyme IIA component |
| SEQ ID NO. 2411 | LM-440.1 | From 1826411 | to 1826704 | glutamyl-tRNA(Gln) |
| | | | | amidotransferase (subunit |
| | | | | C) |
| SEQ ID NO. 2412 | LM-441.1 | From 1824936 | to 1826387 | glutamyl-tRNA(Gln) |
| | | | | amidotransferase (subunit |
| | | | | A) |
| SEQ ID NO. 2413 | LM-442.1 | From 1823494 | to 1824924 | glutamyl-tRNA(Gln) |
| | | | | amidotransferase (subunit |
| | | | | B) |
| SEQ ID NO. 2414 | LM-443.2 | From 1822421 | to 1823353 | Unknown, similar to |
| | | | | unknown protein |
| SEQ ID NO. 2415 | LM-444.2 | From 1821518 | to 1822273 | Unknown |
| SEQ ID NO. 2416 | LM-445.1 | From 1820133 | to 1821494 | Unknown, similar to |
| | | | | hypothetical RNA |
| | | | | methyltransferase |
| SEQ ID NO. 2417 | LM-446.1 | From 1819244 | to 1819798 | Unknown, similar to |
| | | | | unknown protein |
| SEQ ID NO. 2418 | LM-447.2 | From 1818740 | to 1819213 | Unknown, similar to |
| | | | | shikimate kinase |
| SEQ ID NO. 2419 | LM-45.2 | From 2740888 | to 2742957 | unknown, similar to |
| | | | | transcriptional |
| | | | | antiterminator (BglG family) |
| SEQ ID NO. 2420 | LM-451.1 | From 2435023 | to 2436141 | Unknown, similar to S. pyogenes |
| | | | | RofA regulatory |
| | | | | protein |
| SEQ ID NO. 2421 | LM-452.1 | From 2434627 | to 2434866 | Hypothetical protein |
| SEQ ID NO. 2422 | LM-453.1 | From 2433224 | to 2434618 | Unknown, similar to |
| | | | | glutamate decarboxylase |
| SEQ ID NO. 2423 | LM-455.1 | From 2431688 | to 2433211 | Unknown, similar to amino |
| | | | | acid antiporter (acid |
| | | | | resistance) |
| SEQ ID NO. 2424 | LM-456.1 | From 2430826 | to 2431296 | Unknown, conserved |
| | | | | hypothetical protein |
| SEQ ID NO. 2425 | LM-458.1 | From 2428010 | to 2430793 | Unknown, transmembrane |
| | | | | protein |
| SEQ ID NO. 2426 | LM-460.1 | From 2427045 | to 2427890 | Unknown, conserved |
| | | | | hypothetical protein |
| SEQ ID NO. 2427 | LM-463.1 | From 2426270 | to 2427001 | Unknown, similar to N- |
| | | | | acetylglucosamine-6- |
| | | | | phosphate isomerase |
| SEQ ID NO. 2428 | LM-464.1 | From 2425723 | to 2426253 | Unknown, similar to |
| | | | | unknown protein |
| SEQ ID NO. 2429 | LM-466.1 | From 2424922 | to 2425533 | Unknown |
| SEQ ID NO. 2430 | LM-468.1 | From 2423480 | to 2424721 | Unknown; Similar to |
| | | | | multidrug resistance protein |
| SEQ ID NO. 2431 | LM-469.1 | From 2421878 | to 2423476 | Unknown, conserved |
| | | | | hypothetical protein |
| SEQ ID NO. 2432 | LM-47.2 | From 2743326 | to 2744138 | Unknown |
| SEQ ID NO. 2433 | LM-471.1 | From 2419797 | to 2421749 | Unknown, similar to putative |
| | | | | Na+/H+ antiporter |
| SEQ ID NO. 2434 | LM-472.1 | From 2418871 | to 2419770 | Unknown, similar to LysR |
| | | | | family transcription regulator |
| SEQ ID NO. 2435 | LM-473.1 | From 2418083 | to 2418628 | Unknown, similar to NADH- |
| | | | | dependent FMN reductase |
| SEQ ID NO. 2436 | LM-475.1 | From 2417531 | to 2418067 | Unknown, similar to B. subtilis |
| | | | | YtmI protein |
| SEQ ID NO. 2437 | LM-476.1 | From 2416705 | to 2417514 | Unknown, similar to amino |
| | | | | acid ABC transporter |
| | | | | (binding protein) |
| SEQ ID NO. 2438 | LM-477.1 | From 2415967 | to 2416683 | Unknown, similar to amino |
| | | | | acid ABC-transporter |
| | | | | (permease) |
| SEQ ID NO. 2439 | LM-478.1 | From 2415246 | to 2415953 | Unknown, similar to amino |
| | | | | acid ABC transporter |
| | | | | (permease) |
| SEQ ID NO. 2440 | LM-48.1 | From 2744212 | to 2744574 | Unknown, conserved |
| | | | | hypothetical protein |
| SEQ ID NO. 2441 | LM-480.1 | From 2414470 | to 2415249 | Unknown, similar to amino |
| | | | | acid ABC-transporter, ATP- |
| | | | | binding protein |
| SEQ ID NO. 2442 | LM-481.1 | From 2413478 | to 2414473 | Unknown, conserved |
| | | | | hypothetical protein |
| SEQ ID NO. 2443 | LM-482.1 | From 2413219 | to 2413485 | Unknown, similar to B. subtilis |
| | | | | YtnI protein |
| SEQ ID NO. 2444 | LM-483.1 | From 2411900 | to 2413222 | Unknown, similar to |
| | | | | nitrilotriacetate |
| | | | | monooxygenase |
| SEQ ID NO. 2445 | LM-484.1 | From 2411126 | to 2411827 | Unknown, similar to 16S |
| | | | | pseudouridylate synthase |
| SEQ ID NO. 2446 | LM-485.1 | From 2409875 | to 2410993 | similar to kinases |
| SEQ ID NO. 2447 | LM-486.1 | From 2408967 | to 2409878 | Unknown, similar to Erwinia |
| | | | | chrysanthemi IndA protein |
| SEQ ID NO. 2448 | LM-487.1 | From 2408450 | to 2408893 | Unknown, conserved |
| | | | | hypothetical protein |
| SEQ ID NO. 2449 | LM-488.1 | From 2407128 | to 2408453 | aminopeptidase C |
| SEQ ID NO. 2450 | LM-49.1 | From 2744571 | to 2744939 | Unknown |
| SEQ ID NO. 2451 | LM-490.1 | From 2406161 | to 2406913 | Unknown, similar to |
| | | | | regulatory protein DeoR |
| | | | | family |
| SEQ ID NO. 2452 | LM-491.1 | From 2405241 | to 2406164 | fructose-1-phosphate |
| | | | | kinase |
| SEQ ID NO. 2453 | LM-492.1 | From 2403341 | to 2405239 | unknown, highly similar to |
| | | | | phosphotransferase system |
| | | | | (PTS) fructose-specific |
| | | | | enzyme IIABC component |
| SEQ ID NO. 2454 | LM-494.1 | From 2402888 | to 2403235 | Unknown, similar to |
| | | | | transcriptional regulator |
| SEQ ID NO. 2455 | LM-495.1 | From 2402357 | to 2402833 | competence transcription |
| | | | | factor |
| SEQ ID NO. 2456 | LM-496.1 | From 2401008 | to 2402366 | putative integrase |
| | | | | [Bacteriophage A118] |
| SEQ ID NO. 2457 | LM-497.1 | From 2400264 | to 2400944 | Unknown, weakly similar to |
| | | | | gp32_Bacteriophage A118 |
| | | | | protein |
| SEQ ID NO. 2458 | LM-498.1 | From 2399542 | to 2400243 | Unknown, similar to protein |
| | | | | gp33 [Bacteriophage A118] |
| SEQ ID NO. 2459 | LM-5.1 | From 2713962 | to 2714942 | Unknown, similar to |
| | | | | heptaprenyl diphosphate |
| | | | | synthase component II |
| SEQ ID NO. 2460 | LM-500.1 | From 2398685 | to 2399161 | Unknown, similar to a |
| | | | | putative repressor protein |
| | | | | [Bacteriophage A118] |
| SEQ ID NO. 2461 | LM-502.1 | From 2397800 | to 2398084 | Unknown |
| SEQ ID NO. 2462 | LM-503.1 | From 2397493 | to 2397774 | Unknown, similar to protein |
| | | | | gp41 [Bacteriophage A118] |
| SEQ ID NO. 2463 | LM-506.1 | From 2396454 | to 2397230 | Unknown, similar to antirepressor |
| | | | | [Bacteriophage |
| | | | | A118] |
| SEQ ID NO. 2464 | LM-507.1 | From 2395798 | to 2396331 | gp43 [Bacteriophage A118] |
| SEQ ID NO. 2465 | LM-509.1 | From 2394317 | to 2394793 | Unknown, similar to |
| | | | | bacteriophage proteins |
| SEQ ID NO. 2466 | LM-51.1 | From 2744985 | to 2745791 | Unknown, weakly similar to |
| | | | | AraC-like transcription |
| | | | | regulator |
| SEQ ID NO. 2467 | LM-510.1 | From 2393613 | to 2394311 | Unknown |
| SEQ ID NO. 2468 | LM-512.1 | From 2392622 | to 2393596 | Unknown, similar to protein |
| | | | | gp49 [Bacteriophage A118] |
| SEQ ID NO. 2469 | LM-513.1 | From 2391813 | to 2392625 | Unknown, similar to site- |
| | | | | specific DNA- |
| | | | | methyltransferase |
| SEQ ID NO. 2470 | LM-514.1 | From 2391220 | to 2391816 | Unknown, similar to protein |
| | | | | gp51 [Bacteriophage A118] |
| SEQ ID NO. 2471 | LM-517.1 | From 2390580 | to 2391023 | Unknown, similar to a |
| | | | | bacteriophage protein |
| SEQ ID NO. 2472 | LM-518.1 | From 2390113 | to 2390583 | Unknown |
| SEQ ID NO. 2473 | LM-52.1 | From 2745907 | to 2746377 | Unknown, conserved |
| | | | | hypothetical protein |
| SEQ ID NO. 2474 | LM-520.1 | From 2389655 | to 2390116 | Unknown |
| SEQ ID NO. 2475 | LM-522.1 | From 2388729 | to 2389211 | unknown, similar to single- |
| | | | | stranded DNA-binding |
| | | | | protein |
| SEQ ID NO. 2476 | LM-523.1 | From 2388179 | to 2388583 | Unknown |
| SEQ ID NO. 2477 | LM-524.1 | From 2387792 | to 2388175 | unknown |
| SEQ ID NO. 2478 | LM-525.1 | From 2387046 | to 2387480 | Protein gp66 |
| | | | | [Bacteriophage A118] |
| SEQ ID NO. 2479 | LM-527.1 | From 2386141 | to 2386680 | Unknown |
| SEQ ID NO. 2480 | LM-529.1 | From 2385301 | to 2386095 | Unknown, similar to putative |
| | | | | terminase small subunit |
| | | | | from Bacteriophage A118 |
| SEQ ID NO. 2481 | LM-53.1 | From 2746423 | to 2746878 | Unknown, similar to ribose |
| | | | | 5-phosphate epimerase |
| SEQ ID NO. 2482 | LM-530.1 | From 2384001 | to 2385332 | putative terminase large |
| | | | | subunit from Bacteriophage |
| | | | | A118 |
| SEQ ID NO. 2483 | LM-531.1 | From 2382228 | to 2383988 | putative portal protein |
| | | | | [Bacteriophage A118] |
| SEQ ID NO. 2484 | LM-532.1 | From 2381088 | to 2382227 | Protein gp4 [Bacteriophage |
| | | | | A118] |
| SEQ ID NO. 2485 | LM-533.1 | From 2380419 | to 2381009 | Unknown, putative |
| | | | | scaffolding protein |
| | | | | [Bacteriophage A118] |
| SEQ ID NO. 2486 | LM-535.1 | From 2379418 | to 2380419 | Unknown, similar to coat |
| | | | | protein [Bacteriophage |
| | | | | SPP1] |
| SEQ ID NO. 2487 | LM-536.1 | From 2379004 | to 2379399 | Protein gp8 [Bacteriophage |
| | | | | A118] |
| SEQ ID NO. 2488 | LM-537.1 | From 2378642 | to 2379004 | Protein gp9 [Bacteriophage |
| | | | | A118] |
| SEQ ID NO. 2489 | LM-538.1 | From 2378304 | to 2378642 | Protein gp10 |
| | | | | [Bacteriophage A118] |
| SEQ ID NO. 2490 | LM-539.1 | From 2377897 | to 2378304 | Portein gp11 |
| | | | | [Bacteriophage A118] |
| SEQ ID NO. 2491 | LM-54.1 | From 2747073 | to 2747414 | Unknown |
| SEQ ID NO. 2492 | LM-540.1 | From 2377460 | to 2377894 | major tail shaft protein |
| | | | | [Bacteriophage A118] |
| SEQ ID NO. 2493 | LM-541.1 | From 2377198 | to 2377530 | Protein gp13 |
| | | | | [Bacteriophage A118] |
| SEQ ID NO. 2494 | LM-542.1 | From 2376721 | to 2377143 | Protein gp14 |
| | | | | [Bacteriophage A118] |
| SEQ ID NO. 2495 | LM-543.1 | From 2376110 | to 2376715 | Protein gp15 |
| | | | | [Bacteriophage A118] |
| SEQ ID NO. 2496 | LM-548.1 | From 2370736 | to 2376099 | Unknown, putative tape- |
| | | | | measure [Bacteriophage |
| | | | | A118] |
| SEQ ID NO. 2497 | LM-549.1 | From 2369916 | to 2370734 | Protein gp17 |
| | | | | [Bacteriophage A118] |
| SEQ ID NO. 2498 | LM-55.1 | From 2747427 | to 2748683 | Unknown, similar to UV- |
| | | | | damage repair protein |
| SEQ ID NO. 2499 | LM-550.1 | From 2368882 | to 2369907 | Protein gp18 |
| | | | | [Bacteriophage A118] |
| SEQ ID NO. 2500 | LM-552.1 | From 2367853 | to 2368881 | Protein gp19 |
| | | | | [Bacteriophage A118] |
| SEQ ID NO. 2501 | LM-553.1 | From 2366780 | to 2367853 | protein gp20 [Bacteriophage |
| | | | | A118] |
| SEQ ID NO. 2502 | LM-554.1 | From 2366451 | to 2366768 | protein gp21 [Bacteriophage |
| | | | | A118] |
| SEQ ID NO. 2503 | LM-555.1 | From 2365893 | to 2366258 | protein gp23 [Bacteriophage |
| | | | | A118] |
| SEQ ID NO. 2504 | LM-557.1 | From 2365599 | to 2365880 | holin [Bacteriophage A118] |
| SEQ ID NO. 2505 | LM-558.1 | From 2364754 | to 2365599 | L-alanoyl-D-glutamate |
| | | | | peptidase |
| SEQ ID NO. 2506 | LM-559.1 | From 2363709 | to 2364260 | Unknown |
| SEQ ID NO. 2507 | LM-56.1 | From 2748685 | to 2749497 | Unknown, similar to |
| | | | | hydrolase (esterase) |
| SEQ ID NO. 2508 | LM-560.1 | From 2363135 | to 2363632 | Unknown, similar to an |
| | | | | unknown bacteriophage |
| | | | | protein |
| SEQ ID NO. 2509 | LM-562.3 | From 2362661 | to 2363110 | Protein gp28 |
| | | | | [Bacteriophage A118] |
| SEQ ID NO. 2510 | LM-563.3 | From 318 | to 1673 | Chromosomal replication |
| | | | | initiation protein DnaA |
| SEQ ID NO. 2511 | LM-564.1 | From 1867 | to 3012 | DNA polymerase III, beta |
| | | | | chain |
| SEQ ID NO. 2512 | LM-565.1 | From 3121 | to 4464 | Unknown, conserved |
| | | | | hypothetical protein |
| SEQ ID NO. 2513 | LM-566.1 | From 4644 | to 4865 | Unknown, similar to B. subtilis |
| | | | | YaaA protein |
| SEQ ID NO. 2514 | LM-567.1 | From 4869 | to 5981 | RecF protein |
| SEQ ID NO. 2515 | LM-57.1 | From 2749538 | to 2750233 | Unknown, similar to two |
| | | | | components response |
| | | | | regulator |
| SEQ ID NO. 2516 | LM-570.1 | From 6030 | to 7970 | DNA gyrase subunit B |
| SEQ ID NO. 2517 | LM-573.1 | From 8065 | to 10593 | DNA gyrase subunit A |
| SEQ ID NO. 2518 | LM-575.1 | From 10728 | to 12242 | Unknown, similar to |
| | | | | cardiolipin synthase |
| SEQ ID NO. 2519 | LM-576.1 | From 12258 | to 12776 | diamine N-acetyltransferase |
| SEQ ID NO. 2520 | LM-578.1 | From 12918 | to 13886 | Unknown, similar to |
| | | | | mevalonate kinase |
| SEQ ID NO. 2521 | LM-580.1 | From 13843 | to 14814 | unknown, similar to |
| | | | | mevalonate diphosphate |
| | | | | decarboxylase |
| SEQ ID NO. 2522 | LM-581.1 | From 14795 | to 15874 | Unknown, similar to |
| | | | | mevalonate kinases |
| SEQ ID NO. 2523 | LM-582.1 | From 16219 | to 17325 | AA3-600 quinol oxidase |
| | | | | subunit II |
| SEQ ID NO. 2524 | LM-584.1 | From 17344 | to 19323 | AA3-600 quinol oxidase |
| | | | | subunit I |
| SEQ ID NO. 2525 | LM-585.1 | From 19311 | to 19922 | AA3-600 quinol oxidase |
| | | | | subunit III |
| SEQ ID NO. 2526 | LM-586.1 | From 19924 | to 20256 | unknown, highly similar to |
| | | | | quinol oxidase aa3-600 |
| | | | | chain IV |
| SEQ ID NO. 2527 | LM-587.1 | From 20308 | to 21426 | Unknown, similar to Bacillus |
| | | | | anthracis CapA protein |
| | | | | (polyglutamate capsule |
| | | | | biosynthesis) |
| SEQ ID NO. 2528 | LM-589.1 | From 21652 | to 23085 | beta-glucosidase |
| SEQ ID NO. 2529 | LM-591.1 | From 23132 | to 23953 | Unknown |
| SEQ ID NO. 2530 | LM-592.1 | From 24194 | to 24934 | Unknown, similar to |
| | | | | transcriptional regulator |
| | | | | (GntR family) |
| SEQ ID NO. 2531 | LM-593.1 | From 24950 | to 25351 | Unknown, similar to PTS |
| | | | | system, fructose-specific IIA |
| | | | | component |
| SEQ ID NO. 2532 | LM-594.1 | From 25351 | to 25839 | Unknown, similar to PTS |
| | | | | system, fructose-specific IIB |
| | | | | component |
| SEQ ID NO. 2533 | LM-596.1 | From 25862 | to 26665 | Unknown, similar to PTS |
| | | | | system, fructose-specific IIC |
| | | | | component |
| SEQ ID NO. 2534 | LM-597.1 | From 26640 | to 27467 | Unknown, similar to PTS |
| | | | | system, mannose-specific |
| | | | | IID component |
| SEQ ID NO. 2535 | LM-598.1 | From 27495 | to 28199 | Unknown, similar to |
| | | | | phosphoheptose isomerase |
| SEQ ID NO. 2536 | LM-599.1 | From 28254 | to 28895 | Unknown, similar to E. coli |
| | | | | copper homeostasis protein |
| | | | | CutC |
| SEQ ID NO. 2537 | LM-6.1 | From 2715023 | to 2716363 | Unknown |
| SEQ ID NO. 2538 | LM-600.1 | From 29100 | to 31004 | Unknown, similar to PTS |
| | | | | system, beta-glucosides |
| | | | | specific IIABC component |
| SEQ ID NO. 2539 | LM-601.1 | From 31088 | to 31963 | Unknown, similar to E. coli |
| | | | | microcin C7 self-immunity |
| | | | | protein (MccF) |
| SEQ ID NO. 2540 | LM-602.1 | From 32197 | to 32535 | Unknown |
| SEQ ID NO. 2541 | LM-604.1 | From 32571 | to 33380 | Unknown, conserved |
| | | | | hypothetical protein |
| SEQ ID NO. 2542 | LM-605.1 | From 33397 | to 34452 | Unknown, transcriptional |
| | | | | regulator Lacl family |
| SEQ ID NO. 2543 | LM-606.1 | From 34654 | to 35619 | Unknown, similar to xylose |
| | | | | repressor |
| SEQ ID NO. 2544 | LM-608.1 | From 35616 | to 38018 | Unknown, similar to |
| | | | | endoglucanase |
| SEQ ID NO. 2545 | LM-609.1 | From 38031 | to 39383 | Unknown, similar to PTS |
| | | | | system, cellobiose-specific |
| | | | | IIC component |
| SEQ ID NO. 2546 | LM-610.1 | From 39385 | to 40470 | Unknown, similar to |
| | | | | Glucosamine-fructose-6- |
| | | | | phosphate |
| | | | | aminotransferase (C- |
| | | | | terminal domain) |
| SEQ ID NO. 2547 | LM-611.1 | From 40705 | to 41730 | Unknown, similar to |
| | | | | ornithine |
| | | | | carbamoyltransferase |
| SEQ ID NO. 2548 | LM-613.1 | From 41803 | to 43188 | Unknown, similar to amino |
| | | | | acid transporter |
| SEQ ID NO. 2549 | LM-614.1 | From 43175 | to 44266 | Unknown, conserved |
| | | | | hypothetical protein |
| SEQ ID NO. 2550 | LM-615.1 | From 44282 | to 45223 | carbamate kinase |
| SEQ ID NO. 2551 | LM-616.1 | From 45325 | to 46434 | Unknown, conserved |
| | | | | hypothetical protein |
| SEQ ID NO. 2552 | LM-617.1 | From 46451 | to 47230 | Unknown, conserved |
| | | | | hypothetical protein, |
| | | | | hypothetical regulator |
| SEQ ID NO. 2553 | LM-618.1 | From 47335 | to 47994 | Unknown, similar to E. coli |
| | | | | DedA protein |
| SEQ ID NO. 2554 | LM-619.2 | From 48074 | to 49306 | Unknown, similar to arginine |
| | | | | deiminase |
| SEQ ID NO. 2555 | LM-62.1 | From 2750230 | to 2752920 | Unknown, similar to the two |
| | | | | components sensor protein |
| | | | | kdpD |
| SEQ ID NO. 2556 | LM-620.2 | From 703688 | to 703951 | Unknown |
| SEQ ID NO. 2557 | LM-621.3 | From 703128 | to 703691 | Unknown, similar to acetyl |
| | | | | transferase |
| SEQ ID NO. 2558 | LM-622.1 | From 703961 | to 704338 | Unknown, similar to |
| | | | | unknown protein |
| SEQ ID NO. 2559 | LM-623.1 | From 704452 | to 705387 | Unknown, similar to ABC |
| | | | | transporter (ATP-binding |
| | | | | protein) |
| SEQ ID NO. 2560 | LM-624.1 | From 705380 | to 706150 | Unknown, conserved |
| | | | | membrane protein |
| SEQ ID NO. 2561 | LM-625.1 | From 706408 | to 707292 | Unknown, similar to |
| | | | | oxidoreductase |
| SEQ ID NO. 2562 | LM-626.1 | From 707612 | to 708220 | Unknown |
| SEQ ID NO. 2563 | LM-627.1 | From 709134 | to 709562 | Unknown, similar to |
| | | | | unknown protein |
| SEQ ID NO. 2564 | LM-628.1 | From 709829 | to 710749 | Unknown |
| SEQ ID NO. 2565 | LM-629.1 | From 711121 | to 711435 | Unknown |
| SEQ ID NO. 2566 | LM-631.1 | From 711428 | to 712195 | Unknown, similar to flagellar |
| | | | | biosynthesis protein FliP |
| SEQ ID NO. 2567 | LM-632.1 | From 712208 | to 712480 | Unknown, similar to flagellar |
| | | | | biosynthesis protein FliQ |
| SEQ ID NO. 2568 | LM-633.1 | From 712483 | to 713244 | Unknown, similar to flagellar |
| | | | | biosynthetic protein FliR |
| SEQ ID NO. 2569 | LM-635.1 | From 713260 | to 714306 | Unknown, similar to flagellar |
| | | | | biosynthetic protein flhB |
| SEQ ID NO. 2570 | LM-636.1 | From 714353 | to 716428 | Unknown, similar to flagellar- |
| | | | | associated protein flhA |
| SEQ ID NO. 2571 | LM-637.1 | From 716450 | to 717673 | Unknown, similar to |
| | | | | flagellar biosynthesis |
| | | | | protein FlhF |
| SEQ ID NO. 2572 | LM-639.1 | From 717670 | to 718449 | Unknown, similar to flagellar |
| | | | | hook-basal body protein |
| | | | | FlgG |
| SEQ ID NO. 2573 | LM-641.1 | From 718478 | to 719266 | Unknown, similar to |
| | | | | chemotactic |
| | | | | methyltransferase CheR |
| SEQ ID NO. 2574 | LM-642.1 | From 719291 | to 719626 | Unknown |
| SEQ ID NO. 2575 | LM-643.1 | From 719653 | to 720504 | Unknown, similar to motility |
| | | | | protein (flagellar motor |
| | | | | rotation) MotA |
| SEQ ID NO. 2576 | LM-645.1 | From 720464 | to 721291 | Unknown, similar to motility |
| | | | | protein (flagellar motor |
| | | | | rotation) MotB |
| SEQ ID NO. 2577 | LM-647.1 | From 721301 | to 721801 | Unknown |
| SEQ ID NO. 2578 | LM-648.1 | From 721824 | to 723737 | Unknown, similar to |
| | | | | unknown protein |
| SEQ ID NO. 2579 | LM-649.1 | From 723750 | to 724658 | Unknown, similar to CheA |
| | | | | activity-modulating |
| | | | | chemotaxis protein CheV |
| SEQ ID NO. 2580 | LM-65.1 | From 2752936 | to 2753508 | potassium-transporting |
| | | | | ATPase c chain |
| SEQ ID NO. 2581 | LM-650.3 | From 724896 | to 725759 | flagellin protein |
| SEQ ID NO. 2582 | LM-651.1 | From 726034 | to 726393 | Chemotaxis response |
| | | | | regulator CheY |
| SEQ ID NO. 2583 | LM-652.1 | From 726413 | to 728269 | two-component sensor |
| | | | | histidine kinase CheA |
| SEQ ID NO. 2584 | LM-653.1 | From 728282 | to 728581 | Unknown, similar to flagellar |
| | | | | motor switch protein fliY C- |
| | | | | terminal part |
| SEQ ID NO. 2585 | LM-654.1 | From 728600 | to 729010 | Unknown |
| SEQ ID NO. 2586 | LM-657.1 | From 729026 | to 730072 | Unknown |
| SEQ ID NO. 2587 | LM-658.1 | From 730074 | to 730496 | unknown, similar to flagellar |
| | | | | hook assembly protein |
| SEQ ID NO. 2588 | LM-659.1 | From 730516 | to 731751 | Unknown, similar to flagellar |
| | | | | hook protein FlgE |
| SEQ ID NO. 2589 | LM-660.1 | From 732022 | to 733014 | Unknown, similar to flagellar |
| | | | | switch protein FliM |
| SEQ ID NO. 2590 | LM-664.1 | From 733017 | to 734564 | Unknown, similar to flagellar |
| | | | | motor switch protein fliY |
| SEQ ID NO. 2591 | LM-665.1 | From 734570 | to 735973 | Unknown |
| SEQ ID NO. 2592 | LM-668.1 | From 735996 | to 737162 | Unknown |
| SEQ ID NO. 2593 | LM-669.1 | From 737269 | to 737733 | Unknown |
| SEQ ID NO. 2594 | LM-670.1 | From 737743 | to 738171 | Unknown |
| SEQ ID NO. 2595 | LM-671.1 | From 738191 | to 739711 | Unknown, similar to flagellar |
| | | | | hook-associated protein |
| | | | | FlgK |
| SEQ ID NO. 2596 | LM-672.1 | From 739723 | to 740598 | Unknown, similar to flagellar |
| | | | | hook-associated protein 3 |
| | | | | FlgL |
| SEQ ID NO. 2597 | LM-674.1 | From 740610 | to 741899 | Unknown, similar to flagellar |
| | | | | hook-associated protein 2 |
| | | | | FliD |
| SEQ ID NO. 2598 | LM-675.1 | From 741918 | to 742304 | Unknown, similar to |
| | | | | hypothetical flagellar protein |
| SEQ ID NO. 2599 | LM-676.1 | From 742276 | to 742557 | Unknown |
| SEQ ID NO. 2600 | LM-677.1 | From 742578 | to 742979 | Unknown, similar to flagellar |
| | | | | basal-body rod protein flgB |
| SEQ ID NO. 2601 | LM-679.1 | From 742991 | to 743401 | Unknown, similar to flagellar |
| | | | | basal-body rod protein flgC |
| SEQ ID NO. 2602 | LM-680.1 | From 743418 | to 743714 | Unknown, similar to flagellar |
| | | | | hook-basal body complex |
| | | | | protein FliE |
| SEQ ID NO. 2603 | LM-682.1 | From 743782 | to 745434 | Unknown, similar to flagellar |
| | | | | basal-body M-ring protein |
| | | | | fliF |
| SEQ ID NO. 2604 | LM-685.1 | From 745437 | to 746543 | Unknown, similar to flagellar |
| | | | | motor switch protein fliG |
| SEQ ID NO. 2605 | LM-686.1 | From 746530 | to 747222 | Unknown |
| SEQ ID NO. 2606 | LM-688.1 | From 747219 | to 748520 | Unknown, similar to H+- |
| | | | | transporting ATP synthase |
| | | | | alpha chain FliI, flagellar- |
| | | | | specific, |
| SEQ ID NO. 2607 | LM-689.1 | From 748537 | to 749205 | Unknown, similar to |
| | | | | transglycosylase |
| SEQ ID NO. 2608 | LM-69.1 | From 2753523 | to 2755568 | potassium-transporting |
| | | | | atpase b chain |
| SEQ ID NO. 2609 | LM-690.1 | From 749219 | to 749863 | Unknown |
| SEQ ID NO. 2610 | LM-691.1 | From 749985 | to 750311 | Unknown, similar to |
| | | | | unknown protein |
| SEQ ID NO. 2611 | LM-692.1 | From 750311 | to 750634 | Unknown |
| SEQ ID NO. 2612 | LM-693.1 | From 750680 | to 751327 | putative fibronectin-binding |
| | | | | protein |
| SEQ ID NO. 2613 | LM-695.1 | From 751598 | to 753328 | Unknown, similar to |
| | | | | pyruvate oxidase |
| SEQ ID NO. 2614 | LM-697.1 | From 753490 | to 755295 | Unknown, similar to methyl- |
| | | | | accepting chemotaxis |
| | | | | protein |
| SEQ ID NO. 2615 | LM-698.1 | From 755308 | to 756036 | Unknown, similar to B. subtilis |
| | | | | YvpB protein |
| SEQ ID NO. 2616 | LM-699.2 | From 2842413 | to 2843867 | Unknown, similar to beta- |
| | | | | glucosidase |
| SEQ ID NO. 2617 | LM-7.1 | From 2716408 | to 2717394 | Unknown |
| SEQ ID NO. 2618 | LM-700.1 | From 2843914 | to 2844216 | Unknown, similar to PTS |
| | | | | cellobiose-specific enzyme |
| | | | | IIB |
| SEQ ID NO. 2619 | LM-702.1 | From 2844249 | to 2845601 | Unknown, similar to PTS |
| | | | | cellobiose-specific enzyme |
| | | | | IIC component |
| SEQ ID NO. 2620 | LM-703.1 | From 2845613 | to 2846497 | Unknown, similar to xylose |
| | | | | operon regulatory protein |
| | | | | and to glucose kinase |
| SEQ ID NO. 2621 | LM-704.1 | From 2846490 | to 2846798 | Unknown, similar to PTS |
| | | | | cellobiose-specific enzyme |
| | | | | IIA |
| SEQ ID NO. 2622 | LM-705.1 | From 2846839 | to 2847573 | Unknown, similar to |
| | | | | hypothetical transcriptional |
| | | | | regulator |
| SEQ ID NO. 2623 | LM-706.1 | From 2847673 | to 2848335 | Unknown |
| SEQ ID NO. 2624 | LM-707.2 | From 2848406 | to 2849536 | Unknown |
| SEQ ID NO. 2625 | LM-708.3 | From 2849563 | to 2850450 | Unknown, similar to ABC |
| | | | | transporter, ATP-binding |
| | | | | protein |
| SEQ ID NO. 2626 | LM-709.2 | From 2850620 | to 2852950 | Unknown, similar to |
| | | | | gamma-glutamylcysteine |
| | | | | synthetase (for the |
| | | | | N_terminal part) and to |
| | | | | cyanophycin synthetase (C- |
| | | | | terminal part) |
| SEQ ID NO. 2627 | LM-710.1 | From 2852988 | to 2854436 | Unknown, similar to beta- |
| | | | | glucosidase |
| SEQ ID NO. 2628 | LM-711.2 | From 2854429 | to 2856282 | Unknown, similar to beta- |
| | | | | glucoside-specific enzyme |
| | | | | IIABC |
| SEQ ID NO. 2629 | LM-712.2 | From 2856379 | to 2857218 | Unknown, similar to |
| | | | | transcription antiterminator |
| SEQ ID NO. 2630 | LM-714.1 | From 2857580 | to 2858203 | Unknown, similar to ABC |
| | | | | transporter, ATP-binding |
| | | | | protein |
| SEQ ID NO. 2631 | LM-715.1 | From 2858196 | to 2860364 | Unknown |
| SEQ ID NO. 2632 | LM-716.1 | From 2860426 | to 2860821 | Unknown |
| SEQ ID NO. 2633 | LM-717.1 | From 2861424 | to 2862614 | Unknown, similar to efflux |
| | | | | protein |
| SEQ ID NO. 2634 | LM-718.1 | From 2862774 | to 2863283 | Unknown |
| SEQ ID NO. 2635 | LM-720.1 | From 2863561 | to 2864661 | Unknown, similar to |
| | | | | probable GTP-binding |
| | | | | protein |
| SEQ ID NO. 2636 | LM-721.1 | From 2864813 | to 2865121 | Unknown, similar to |
| | | | | cellobiose PTS enzyme IIA |
| SEQ ID NO. 2637 | LM-723.1 | From 2865127 | to 2867397 | Unknown, similar to beta- |
| | | | | glucosidase |
| SEQ ID NO. 2638 | LM-724.1 | From 2867432 | to 2867731 | Unknown, similar to PTS, |
| | | | | cellobiose-specific IIB |
| | | | | component |
| SEQ ID NO. 2639 | LM-725.1 | From 2867746 | to 2869041 | Unknown, similar to |
| | | | | cellobiose |
| | | | | phosphotransferase system |
| | | | | enzyme IIC |
| SEQ ID NO. 2640 | LM-726.1 | From 2869191 | to 2871107 | Unknown, simliar to |
| | | | | lichenan operon |
| | | | | transcription antiterminator |
| | | | | IicR |
| SEQ ID NO. 2641 | LM-727.1 | From 2871318 | to 2872784 | catalase |
| SEQ ID NO. 2642 | LM-728.1 | From 2872932 | to 2873915 | Unknown |
| SEQ ID NO. 2643 | LM-73.1 | From 2755580 | to 2757265 | unknown, highly similar to |
| | | | | potassium-transporting |
| | | | | atpase a chain |
| SEQ ID NO. 2644 | LM-730.1 | From 2873915 | to 2875837 | beta-glucoside-specific |
| | | | | phosphotransferase |
| | | | | enzyme II |
| SEQ ID NO. 2645 | LM-731.2 | From 2875945 | to 2876775 | transcription antiterminator |
| SEQ ID NO. 2646 | LM-733.2 | From 2877160 | to 2878011 | Partition protein ParB |
| | | | | homolg |
| SEQ ID NO. 2647 | LM-734.1 | From 2878004 | to 2878765 | Partition protein, ParA |
| | | | | homolog |
| SEQ ID NO. 2648 | LM-735.1 | From 2878989 | to 2879747 | Unknown |
| SEQ ID NO. 2649 | LM-736.1 | From 2879906 | to 2880205 | Unknown |
| SEQ ID NO. 2650 | LM-737.1 | From 2880217 | to 2881071 | Unknown, highly similar to |
| | | | | B. subtilis DNA-binding |
| | | | | protein Spo0J-like homolog |
| | | | | YyaA |
| SEQ ID NO. 2651 | LM-739.1 | From 2881243 | to 2882049 | Unknown, similar to E. coli |
| | | | | RpiR transcription regulator |
| SEQ ID NO. 2652 | LM-74.1 | From 2757606 | to 2757911 | Unknown, similar to |
| | | | | cellobiose |
| | | | | phosphotransferase |
| | | | | enzyme IIB component |
| SEQ ID NO. 2653 | LM-740.1 | From 2882033 | to 2882938 | Unknown, similar to |
| | | | | transcription regulator |
| SEQ ID NO. 2654 | LM-741.1 | From 2882963 | to 2883409 | Unknown, similar to |
| | | | | phosphotransferase system |
| | | | | mannitol-specific enzyme |
| | | | | IIA |
| SEQ ID NO. 2655 | LM-742.1 | From 2883422 | to 2884078 | Unknown, similar to |
| | | | | phosphatase |
| SEQ ID NO. 2656 | LM-744.1 | From 2884141 | to 2885547 | Unknown, similar to |
| | | | | phosphotransferase system |
| | | | | mannitol-specific enzyme |
| | | | | IIBC |
| SEQ ID NO. 2657 | LM-747.1 | From 2885581 | to 2886582 | Unknown, similar to |
| | | | | dehydrogenase |
| SEQ ID NO. 2658 | LM-748.2 | From 2886584 | to 2887297 | Unknown, similar to a |
| | | | | putative N- |
| | | | | acetylmannosamine-6- |
| | | | | phosphate epimerase |
| SEQ ID NO. 2659 | LM-749.2 | From 2536347 | to 2538581 | unknown, similar to |
| | | | | transport protein |
| SEQ ID NO. 2660 | LM-750.1 | From 2538588 | to 2539196 | Unknown, similar to |
| | | | | transcription regulator |
| SEQ ID NO. 2661 | LM-751.1 | From 2539213 | to 2539611 | Unknown |
| SEQ ID NO. 2662 | LM-752.1 | From 2539838 | to 2540173 | Unknown |
| SEQ ID NO. 2663 | LM-753.1 | From 2540421 | to 2541857 | Unknown, similar to |
| | | | | chitinase and chitin binding |
| | | | | protein |
| SEQ ID NO. 2664 | LM-754.1 | From 2542014 | to 2542610 | ATP-dependent Clp |
| | | | | protease proteolytic subunit |
| SEQ ID NO. 2665 | LM-755.1 | From 2542658 | to 2544049 | Unknown, similar to amino |
| | | | | acid transporter |
| SEQ ID NO. 2666 | LM-758.1 | From 2545487 | to 2546503 | Unknown, similar to NADH |
| | | | | oxidase |
| SEQ ID NO. 2667 | LM-759.1 | From 2546530 | to 2547501 | Unknown, conserved |
| | | | | hypothetical protein |
| SEQ ID NO. 2668 | LM-760.1 | From 2547509 | to 2548477 | unknown, conserved |
| | | | | hypothetical protein |
| SEQ ID NO. 2669 | LM-761.1 | From 2548479 | to 2549354 | unknown, conserved |
| | | | | hypothetical protein |
| SEQ ID NO. 2670 | LM-762.1 | From 2549462 | to 2551192 | Unknown, similar to |
| | | | | phosphomannomutase and |
| | | | | phosphoglucomutase |
| SEQ ID NO. 2671 | LM-763.1 | From 2551234 | to 2552295 | Unknown, similar to aldose |
| | | | | 1-epimerase (mutarotase) |
| SEQ ID NO. 2672 | LM-764.1 | From 2552312 | to 2553295 | UDP-glucose 4-epimerase |
| SEQ ID NO. 2673 | LM-765.1 | From 2553414 | to 2554373 | thioredoxin reductase |
| SEQ ID NO. 2674 | LM-766.1 | From 2554452 | to 2555927 | Unknown |
| SEQ ID NO. 2675 | LM-767.1 | From 2556013 | to 2556510 | Unknown, similar to |
| | | | | acetyltransferase |
| SEQ ID NO. 2676 | LM-768.1 | From 2556514 | to 2557167 | Unknown, similar to B. subtilis |
| | | | | P-Ser-HPr |
| | | | | phosphatase |
| SEQ ID NO. 2677 | LM-769.1 | From 2557211 | to 2558044 | unknown, highly similar to |
| | | | | prolipoprotein diacylglyceryl |
| | | | | transferase |
| SEQ ID NO. 2678 | LM-77.1 | From 2758046 | to 2759353 | Unknown, similar to |
| | | | | cellobiose |
| | | | | phosphotransferase |
| | | | | enzyme IIC component |
| SEQ ID NO. 2679 | LM-771.1 | From 2558130 | to 2559068 | HPr-P(Ser) |
| | | | | kinase/phosphatase |
| SEQ ID NO. 2680 | LM-772.1 | From 2559255 | to 2559608 | Unknown, similar to B. subtilis |
| | | | | YvlD protein |
| SEQ ID NO. 2681 | LM-774.1 | From 2559841 | to 2561052 | unknown |
| SEQ ID NO. 2682 | LM-776.1 | From 2561120 | to 2562382 | Unknown, similar to B. subtilis |
| | | | | YvlB protein |
| SEQ ID NO. 2683 | LM-778.1 | From 2562591 | to 2565461 | excinuclease ABC (subunit |
| | | | | A) |
| SEQ ID NO. 2684 | LM-78.1 | From 2759390 | to 2759692 | Unknown, similar to |
| | | | | cellobiose |
| | | | | phosphotransferase |
| | | | | enzyme IIA component |
| SEQ ID NO. 2685 | LM-780.1 | From 2565469 | to 2567445 | excinuclease ABC (subunit |
| | | | | B) |
| SEQ ID NO. 2686 | LM-781.1 | From 2567956 | to 2568603 | Unknown |
| SEQ ID NO. 2687 | LM-782.1 | From 2568625 | to 2569011 | unknown |
| SEQ ID NO. 2688 | LM-783.1 | From 2569117 | to 2569422 | Unknown, similar to |
| | | | | transcription regulator ArsR |
| | | | | family |
| SEQ ID NO. 2689 | LM-784.1 | From 2569690 | to 2570349 | Unknown, similar to |
| | | | | negative regulator of |
| | | | | phosphate regulon |
| SEQ ID NO. 2690 | LM-786.1 | From 2570362 | to 2571141 | unknown, similar to |
| | | | | phosphate ABC transporter |
| | | | | (ATP-binding protein) |
| SEQ ID NO. 2691 | LM-788.1 | From 2571156 | to 2571971 | unknown, similar to |
| | | | | phosphate ABC transporter |
| | | | | (ATP-binding protein) |
| SEQ ID NO. 2692 | LM-789.1 | From 2571999 | to 2572883 | Unknown, similar to |
| | | | | phosphate ABC transporter |
| | | | | (permease protein) |
| SEQ ID NO. 2693 | LM-791.1 | From 2572880 | to 2573803 | Unknown, similar to |
| | | | | phosphate ABC transporter |
| | | | | (permease protein) |
| SEQ ID NO. 2694 | LM-793.1 | From 2573897 | to 2574805 | Unknown, similar to |
| | | | | phosphate ABC transporter |
| | | | | (binding protein) |
| SEQ ID NO. 2695 | LM-794.1 | From 2575061 | to 2576836 | two-component sensor |
| | | | | histidine kinase |
| SEQ ID NO. 2696 | LM-795.1 | From 2576836 | to 2577546 | two-component response |
| | | | | regulator |
| SEQ ID NO. 2697 | LM-796.2 | From 2577696 | to 2578871 | Unknown |
| SEQ ID NO. 2698 | LM-797.2 | From 2578899 | to 2580347 | Unknown, similar to |
| | | | | cardiolipin synthase |
| SEQ ID NO. 2699 | LM-799.2 | From 2278639 | to 2279292 | competence negative |
| | | | | regulator mecA |
| SEQ ID NO. 2700 | LM-8.1 | From 2717422 | to 2718234 | Unknown |
| SEQ ID NO. 2701 | LM-80.1 | From 2760147 | to 2760680 | unknown |
| SEQ ID NO. 2702 | LM-801.1 | From 2277398 | to 2278513 | Unknown, similar to a |
| | | | | putative competence protein |
| | | | | from streptococcus |
| | | | | pneumoniae |
| SEQ ID NO. 2703 | LM-803.1 | From 2275520 | to 2277325 | Unknown, similar to |
| | | | | oligoendopeptidase |
| SEQ ID NO. 2704 | LM-804.1 | From 2274961 | to 2275221 | Unknown |
| SEQ ID NO. 2705 | LM-805.1 | From 2274127 | to 2274750 | Unknown |
| SEQ ID NO. 2706 | LM-806.1 | From 2272403 | to 2274112 | Unknown |
| SEQ ID NO. 2707 | LM-807.1 | From 2271444 | to 2272316 | Unknown, similar to |
| | | | | ferrichrome ABC transporter |
| | | | | (binding protein) |
| SEQ ID NO. 2708 | LM-809.1 | From 2270465 | to 2271454 | Unknown, similar to |
| | | | | ferrichrome ABC transporter |
| | | | | (permease) |
| SEQ ID NO. 2709 | LM-81.1 | From 2760845 | to 2761954 | Unknown, simlilar to cell |
| | | | | division protein FtsW |
| SEQ ID NO. 2710 | LM-810.1 | From 2269705 | to 2270484 | Unknown, similar to |
| | | | | ferrichrome ABC transporter |
| | | | | (ATP-binding protein) |
| SEQ ID NO. 2711 | LM-812.1 | From 2268961 | to 2269701 | Unknown, similar to |
| | | | | unknown protein |
| SEQ ID NO. 2712 | LM-813.2 | From 2268424 | to 2268900 | Unknown, similar to |
| | | | | unknown protein |
| SEQ ID NO. 2713 | LM-817.1 | From 2259366 | to 2259713 | Unknown, similar to |
| | | | | unknown protein |
| SEQ ID NO. 2714 | LM-818.1 | From 2258697 | to 2259260 | Unknown, similar to |
| | | | | transcriptional regulator |
| | | | | (tetR family) |
| SEQ ID NO. 2715 | LM-820.1 | From 2257754 | to 2258515 | Unknown, similar to |
| | | | | dehydrogenase |
| SEQ ID NO. 2716 | LM-821.1 | From 2256507 | to 2257580 | Unknown, similar to |
| | | | | unknown proteins |
| SEQ ID NO. 2717 | LM-823.1 | From 2255034 | to 2256401 | Unknown, similar to sigma- |
| | | | | 54-dependent |
| | | | | transcriptional activator |
| SEQ ID NO. 2718 | LM-826.1 | From 2253221 | to 2254804 | Unknown, similar to |
| | | | | propionate CoA-transferase |
| SEQ ID NO. 2719 | LM-827.1 | From 2252001 | to 2253224 | Unknown, similar to |
| | | | | antiporter proteins |
| SEQ ID NO. 2720 | LM-83.1 | From 2761951 | to 2763081 | Unknown, simlilar to cell |
| | | | | division protein FtsW |
| SEQ ID NO. 2721 | LM-830.1 | From 2251050 | to 2251979 | Unknown, similar to |
| | | | | unknown proteins |
| SEQ ID NO. 2722 | LM-831.1 | From 2250431 | to 2250820 | Unknown, similar to |
| | | | | glyoxalase I |
| SEQ ID NO. 2723 | LM-833.1 | From 2249683 | to 2250300 | Unknown, similar to |
| | | | | unknown proteins |
| SEQ ID NO. 2724 | LM-834.1 | From 2248946 | to 2249617 | Unknown |
| SEQ ID NO. 2725 | LM-835.1 | From 2247998 | to 2248693 | Unknown, similar to |
| | | | | transcription regulator |
| | | | | CRP/FNR family |
| SEQ ID NO. 2726 | LM-836.1 | From 2247050 | to 2247928 | Unknown, similar to |
| | | | | transcriptional regulator |
| | | | | (AraC/XylS family) |
| SEQ ID NO. 2727 | LM-837.1 | From 2245899 | to 2246975 | Unknown, similar to |
| | | | | oxidoreductase |
| SEQ ID NO. 2728 | LM-838.1 | From 2245143 | to 2245883 | Unknown, similar to |
| | | | | unknown proteins |
| SEQ ID NO. 2729 | LM-839.1 | From 2244419 | to 2245141 | Unknown |
| SEQ ID NO. 2730 | LM-840.1 | From 2243448 | to 2244416 | Unknown, similar to |
| | | | | unknown proteins |
| SEQ ID NO. 2731 | LM-841.1 | From 2242376 | to 2243425 | Unknown, similar to |
| | | | | oxidoreductase |
| SEQ ID NO. 2732 | LM-842.1 | From 2240068 | to 2241969 | Unknown |
| SEQ ID NO. 2733 | LM-843.1 | From 2239672 | to 2240013 | Unknown |
| SEQ ID NO. 2734 | LM-845.1 | From 2236844 | to 2239135 | Unknown, similar to |
| | | | | ribonucleoside-diphosphate |
| | | | | reductase, subunit alpha |
| SEQ ID NO. 2735 | LM-846.1 | From 2235739 | to 2236788 | Unknown, similar to |
| | | | | ribonucleoside-diphosphate |
| | | | | reductase, subunit beta |
| SEQ ID NO. 2736 | LM-847.1 | From 2235305 | to 2235742 | Unknown, similar to |
| | | | | flavodoxin |
| SEQ ID NO. 2737 | LM-848.1 | From 2234982 | to 2235308 | Unknown, similar to |
| | | | | thioredoxin |
| SEQ ID NO. 2738 | LM-849.1 | From 2234575 | to 2234874 | Unknown, similar to |
| | | | | unknown proteins |
| SEQ ID NO. 2739 | LM-85.1 | From 2763082 | to 2765652 | Unknown, highly similar to |
| | | | | Mg2+ transport ATPase |
| SEQ ID NO. 2740 | LM-850.1 | From 2233841 | to 2234158 | Unknown, similar to |
| | | | | unknown proteins |
| SEQ ID NO. 2741 | LM-851.1 | From 2233150 | to 2233791 | Unknown, similar to |
| | | | | unknown proteins |
| SEQ ID NO. 2742 | LM-853.1 | From 2232087 | to 2233094 | Unknown, similar to |
| | | | | unknown proteins |
| SEQ ID NO. 2743 | LM-854.1 | From 2231127 | to 2231981 | Unknown, similar to |
| | | | | transcription regulator LysR |
| | | | | family |
| SEQ ID NO. 2744 | LM-856.1 | From 2230042 | to 2231058 | Unknown, similar to |
| | | | | unknown protein |
| SEQ ID NO. 2745 | LM-857.1 | From 2229193 | to 2229927 | Unknown, similar to |
| | | | | transcription regulator GntR |
| | | | | family |
| SEQ ID NO. 2746 | LM-858.1 | From 2227412 | to 2229154 | Unknown, weakly similar to |
| | | | | mannose-6-phosphate |
| | | | | isomerase |
| SEQ ID NO. 2747 | LM-859.1 | From 2226533 | to 2227198 | Unknown |
| SEQ ID NO. 2748 | LM-860.1 | From 2225471 | to 2225944 | Unknown, similar to |
| | | | | unknown protein |
| SEQ ID NO. 2749 | LM-861.1 | From 2224219 | to 2225454 | Unknown, similar to ABC |
| | | | | transporter (membrane |
| | | | | protein) |
| SEQ ID NO. 2750 | LM-862.1 | From 2223324 | to 2224226 | Unknown, similar to ABC |
| | | | | transporter (ATP-binding |
| | | | | protein) |
| SEQ ID NO. 2751 | LM-863.1 | From 2221671 | to 2223128 | Unknown, similar to |
| | | | | transcription regulator |
| SEQ ID NO. 2752 | LM-865.1 | From 2221186 | to 2221659 | Unknown, similar to PTS |
| | | | | system, fructose-specific |
| | | | | enzyme IIA component |
| SEQ ID NO. 2753 | LM-866.1 | From 2220862 | to 2221173 | Unknown, similar to PTS |
| | | | | system, fructose-specific |
| | | | | enzyme IIB component |
| SEQ ID NO. 2754 | LM-867.1 | From 2219751 | to 2220845 | Unknown, similar to PTS |
| | | | | system, fructose-specific |
| | | | | enzyme IIC component |
| SEQ ID NO. 2755 | LM-869.1 | From 2218879 | to 2219733 | Unknown, similar to |
| | | | | fructose-1,6-biphosphate |
| | | | | aldolase type II |
| SEQ ID NO. 2756 | LM-87.1 | From 2766207 | to 2766773 | Unknown, similar to |
| | | | | transcription regulator, TetR |
| | | | | family |
| SEQ ID NO. 2757 | LM-870.1 | From 2217963 | to 2218862 | Unknown, similar to |
| | | | | fructose-1,6-biphosphate |
| | | | | aldolase type II |
| SEQ ID NO. 2758 | LM-871.1 | From 2217222 | to 2217953 | Unknown |
| SEQ ID NO. 2759 | LM-872.1 | From 2216054 | to 2216743 | Unknown |
| SEQ ID NO. 2760 | LM-874.2 | From 2486136 | to 2486921 | Unknown, similar to ABC |
| | | | | transporter, ATP-binding |
| | | | | protein |
| SEQ ID NO. 2761 | LM-875.1 | From 2484816 | to 2486117 | Unknown, similar to |
| | | | | aminotransferase |
| SEQ ID NO. 2762 | LM-876.1 | From 2483589 | to 2484815 | Unknown, similar to |
| | | | | aminotransferase |
| SEQ ID NO. 2763 | LM-877.1 | From 2483149 | to 2483592 | Unknown, similar to |
| | | | | conserved hypothetical |
| | | | | proteins |
| SEQ ID NO. 2764 | LM-878.1 | From 2481732 | to 2483126 | Unknown, similar to |
| | | | | conserved hypothetical |
| | | | | proteins |
| SEQ ID NO. 2765 | LM-879.1 | From 2481023 | to 2481574 | Unknown |
| SEQ ID NO. 2766 | LM-880.1 | From 2480531 | to 2480944 | Unknown |
| SEQ ID NO. 2767 | LM-881.1 | From 2479607 | to 2479921 | unknown |
| SEQ ID NO. 2768 | LM-883.1 | From 2478623 | to 2479465 | unknown, similar to B. subtilis |
| | | | | YunF protein |
| SEQ ID NO. 2769 | LM-884.1 | From 2478225 | to 2478590 | Unknown |
| SEQ ID NO. 2770 | LM-885.1 | From 2477385 | to 2478224 | Unknown, similar to |
| | | | | conserved hypothetical |
| | | | | proteins |
| SEQ ID NO. 2771 | LM-886.1 | From 2475860 | to 2477251 | Unknown, similar to B. subtilis |
| | | | | YunD protein |
| SEQ ID NO. 2772 | LM-887.1 | From 2475588 | to 2475863 | Unknown, similar to B. subtilis |
| | | | | YutD protein |
| SEQ ID NO. 2773 | LM-888.1 | From 2474801 | to 2475568 | Unknown, similar to |
| | | | | conserved hypothetical |
| | | | | protein and to B. subtilis |
| | | | | YutF protein |
| SEQ ID NO. 2774 | LM-889.1 | From 2474309 | to 2474752 | Unknown, similar to |
| | | | | acetyltransferase |
| SEQ ID NO. 2775 | LM-89.1 | From 2766935 | to 2768707 | Unknown, similar to |
| | | | | autolysin, N- |
| | | | | acetylmuramidase |
| SEQ ID NO. 2776 | LM-890.1 | From 2472963 | to 2474273 | Unknown, similar to |
| | | | | conserved hypothetical |
| | | | | proteins |
| SEQ ID NO. 2777 | LM-892.1 | From 2472438 | to 2472938 | Unknown, low temperature |
| | | | | requirement C protein, also |
| | | | | similar to B. subtilis YutG |
| | | | | protein |
| SEQ ID NO. 2778 | LM-893.1 | From 2472089 | to 2472325 | Unknown, similar to NifU |
| | | | | protein |
| SEQ ID NO. 2779 | LM-896.1 | From 2468210 | to 2468392 | Unknown, hypothetical CDS |
| SEQ ID NO. 2780 | LM-897.1 | From 2467643 | to 2467969 | Unknown, similar to B. subtilis |
| | | | | YuzD protein |
| SEQ ID NO. 2781 | LM-899.1 | From 2466713 | to 2467342 | Unknown, conserved |
| | | | | hypothetical protein similar |
| | | | | to B. subtilis YhfK protein |
| SEQ ID NO. 2782 | LM-90.1 | From 2768944 | to 2769273 | Unknown |
| SEQ ID NO. 2783 | LM-901.1 | From 2465630 | to 2466625 | Unknown, similar to |
| | | | | hypothetical thioredoxine |
| | | | | reductase |
| SEQ ID NO. 2784 | LM-903.1 | From 2463969 | to 2465180 | Unknown, similar to NADH |
| | | | | dehydrogenase |
| SEQ ID NO. 2785 | LM-904.1 | From 2463066 | to 2463884 | Unknown, similar to B. subtilis |
| | | | | YwqG protein |
| SEQ ID NO. 2786 | LM-906.1 | From 2461803 | to 2463029 | Unknown, conserved |
| | | | | hypothetical protein |
| SEQ ID NO. 2787 | LM-907.1 | From 2461219 | to 2461692 | Unknown, similar to B. subtilis |
| | | | | YuiD protein |
| SEQ ID NO. 2788 | LM-908.1 | From 2460720 | to 2461091 | Unknown, similar to B. subtilis |
| | | | | YuxO protein |
| SEQ ID NO. 2789 | LM-91.1 | From 2769381 | to 2770007 | Unknown, similar to |
| | | | | thymidylate kinase |
| SEQ ID NO. 2790 | LM-910.1 | From 2460090 | to 2460683 | unknown, similar to proteins |
| | | | | involved in resistance to |
| | | | | cholate and to NA(+) and in |
| | | | | pH homeostasis |
| SEQ ID NO. 2791 | LM-911.1 | From 2459819 | to 2460106 | unknown, similar to proteins |
| | | | | involved in resistance to |
| | | | | cholate and to NA(+) and in |
| | | | | pH homeostasis |
| SEQ ID NO. 2792 | LM-912.1 | From 2459343 | to 2459822 | unknown, similar to proteins |
| | | | | involved in resistance to |
| | | | | cholate and to NA(+) and in |
| | | | | pH homeostasis |
| SEQ ID NO. 2793 | LM-913.1 | From 2457852 | to 2459336 | unknown, similar to proteins |
| | | | | involved in resistance to |
| | | | | cholate and to NA(+) and in |
| | | | | pH homeostasis |
| SEQ ID NO. 2794 | LM-915.1 | From 2457512 | to 2457859 | unknown, similar to proteins |
| | | | | involved in resistance to |
| | | | | cholate and to NA(+) and in |
| | | | | pH homeostasis |
| SEQ ID NO. 2795 | LM-916.1 | From 2457087 | to 2457512 | unknown, similar to proteins |
| | | | | involved in resistance to |
| | | | | cholate and to NA(+) and in |
| | | | | pH homeostasis |
| SEQ ID NO. 2796 | LM-917.1 | From 2454695 | to 2457103 | unknown, similar to proteins |
| | | | | involved in resistance to |
| | | | | cholate and to NA(+) and in |
| | | | | pH homeostasis |
| SEQ ID NO. 2797 | LM-918.1 | From 2453138 | to 2454349 | Unknown, similar to multidrug |
| | | | | resistance efflux pump |
| SEQ ID NO. 2798 | LM-919.1 | From 2452322 | to 2452906 | Unknown, similar to |
| | | | | peptidyl-prolyl cis-trans |
| | | | | isomerase |
| SEQ ID NO. 2799 | LM-92.1 | From 2770060 | to 2771439 | Unknown, similar to lysine |
| | | | | decarboxylase |
| SEQ ID NO. 2800 | LM-920.1 | From 2451840 | to 2452235 | Unknown |
| SEQ ID NO. 2801 | LM-922.1 | From 2450437 | to 2451798 | Unknown, similar to |
| | | | | aspartate kinase |
| SEQ ID NO. 2802 | LM-923.1 | From 2449878 | to 2450192 | Unknown, similar to |
| | | | | phosphotransferase system |
| | | | | (PTS) beta-glucoside- |
| | | | | specific enzyme IIB |
| | | | | component |
| SEQ ID NO. 2803 | LM-924.1 | From 2449155 | to 2449835 | unknown, similar to ABC- |
| | | | | transporter ATP binding |
| | | | | proteins |
| SEQ ID NO. 2804 | LM-925.1 | From 2448052 | to 2449155 | Unknown, similar to putative |
| | | | | ABC-transporter |
| | | | | transmembrane subunit |
| SEQ ID NO. 2805 | LM-926.1 | From 2446747 | to 2447913 | Unknown, similar to |
| | | | | aminotransferase |
| SEQ ID NO. 2806 | LM-927.1 | From 2446240 | to 2446593 | Unknown, similar to B. subtilis |
| | | | | general stress |
| | | | | protein 13 containing a |
| | | | | ribosomal S1 protein |
| | | | | domain |
| SEQ ID NO. 2807 | LM-929.1 | From 2445685 | to 2446092 | Unknown |
| SEQ ID NO. 2808 | LM-930.2 | From 2444231 | to 2445583 | glucose-6-phosphate |
| | | | | isomerase |
| SEQ ID NO. 2809 | LM-931.2 | From 2443368 | to 2444126 | Unknown, similar to |
| | | | | transcription regulator DeoR |
| | | | | family |
| SEQ ID NO. 2810 | LM-935.1 | From 198201 | to 199409 | Unknown, similar to ABC |
| | | | | transporter, ATP-binding |
| | | | | protein |
| SEQ ID NO. 2811 | LM-936.1 | From 197512 | to 198204 | ABC transporter, ATP- |
| | | | | binding protein |
| SEQ ID NO. 2812 | LM-937.1 | From 196786 | to 197463 | unknown |
| SEQ ID NO. 2813 | LM-938.1 | From 195793 | to 196611 | Unknown, similar to PurR, |
| | | | | transcription repressor of |
| | | | | purine operon of B. subtilis |
| SEQ ID NO. 2814 | LM-939.1 | From 194892 | to 195629 | Unknown, similar to a |
| | | | | putative phospho-beta- |
| | | | | glucosidase |
| SEQ ID NO. 2815 | LM-94.1 | From 2771623 | to 2772612 | Unknown, similar to |
| | | | | dihydroxyacetone kinase |
| SEQ ID NO. 2816 | LM-941.1 | From 193989 | to 194870 | Unknown, similar to B. subtilis |
| | | | | YabH protein |
| SEQ ID NO. 2817 | LM-942.1 | From 193593 | to 193850 | Unknown, highly similar to |
| | | | | B. subtilis Veg protein |
| SEQ ID NO. 2818 | LM-943.1 | From 192586 | to 193473 | dimethyladenosine |
| | | | | transferase (16S rRNA |
| | | | | dimethylase) |
| SEQ ID NO. 2819 | LM-945.1 | From 192018 | to 192593 | Unknown, similar to B. subtilis |
| | | | | YabF protein |
| SEQ ID NO. 2820 | LM-946.1 | From 190690 | to 191916 | Unknown, similar to B. subtilis |
| | | | | YabE protein |
| SEQ ID NO. 2821 | LM-947.1 | From 189625 | to 190398 | Unknown, similar to |
| | | | | conserved hypothetical |
| | | | | proteins |
| SEQ ID NO. 2822 | LM-949.1 | From 187867 | to 189528 | Unknown, similar to oligo- |
| | | | | 1,6-glucosidase |
| SEQ ID NO. 2823 | LM-95.1 | From 2772634 | to 2773230 | Unknown, similar to |
| | | | | hypothetical |
| | | | | dihydroxyacetone kinase |
| SEQ ID NO. 2824 | LM-950.1 | From 185572 | to 187863 | Unknown, similar to alpha- |
| | | | | glucosidase |
| SEQ ID NO. 2825 | LM-955.1 | From 182267 | to 185569 | Unknown, similar to alpha- |
| | | | | xylosidase and alpha- |
| | | | | glucosidase |
| SEQ ID NO. 2826 | LM-958.1 | From 180928 | to 182184 | Unknown, similar to sugar |
| | | | | ABC transporter, |
| | | | | periplasmic sugar-binding |
| | | | | protein |
| SEQ ID NO. 2827 | LM-96.1 | From 2773234 | to 2773608 | unknown |
| SEQ ID NO. 2828 | LM-960.1 | From 180052 | to 180900 | Unknown, similar to sugar |
| | | | | ABC transporter, permease |
| | | | | protein |
| SEQ ID NO. 2829 | LM-961.1 | From 179174 | to 180052 | Unknown, similar to sugar |
| | | | | ABC transporters, |
| | | | | permease proteins |
| SEQ ID NO. 2830 | LM-962.1 | From 177924 | to 179138 | Unknown, similar to xylose |
| | | | | repressor |
| SEQ ID NO. 2831 | LM-964.1 | From 175766 | to 177760 | methionyl-tRNA synthetase |
| SEQ ID NO. 2832 | LM-965.1 | From 174834 | to 175694 | Unknown, similar to glucose |
| | | | | uptake protein |
| SEQ ID NO. 2833 | LM-968.1 | From 172903 | to 173208 | Unknown, similar to |
| | | | | transposase |
| SEQ ID NO. 2834 | LM-969.1 | From 172410 | to 172802 | Unknown, similar to |
| | | | | transposase (N-terminal |
| | | | | part) |
| SEQ ID NO. 2835 | LM-97.1 | From 2773714 | to 2774565 | Unknown, similar to putative |
| | | | | transcription regulator |
| SEQ ID NO. 2836 | LM-970.1 | From 172072 | to 172410 | Unknown, similar to |
| | | | | transposase C-terminal part |
| SEQ ID NO. 2837 | LM-975.1 | From 168005 | to 169270 | Unknown |
| SEQ ID NO. 2838 | LM-977.1 | From 167086 | to 167943 | Unknown, similar to a |
| | | | | glucose uptake protein |
| SEQ ID NO. 2839 | LM-978.1 | From 166687 | to 166971 | Unknown, similar to B. subtilis |
| | | | | transcription |
| | | | | regulatory protein AbrB |
| SEQ ID NO. 2840 | LM-98.1 | From 2774684 | to 2775523 | Unknown, similar to |
| | | | | conserved hypothetical |
| | | | | protein |
| SEQ ID NO. 2841 | LM-981.1 | From 165761 | to 166642 | Unknown, conserved |
| | | | | hypothetical protein |
| SEQ ID NO. 2842 | LM-982.1 | From 165492 | to 165764 | unknown, similar to B. subtilis |
| | | | | YazA protein |
| SEQ ID NO. 2843 | LM-983.1 | From 164756 | to 165508 | unknown, conserved |
| | | | | hypothetical protein |
| SEQ ID NO. 2844 | LM-984.1 | From 164309 | to 164698 | Unknown, similar to B. subtilis |
| | | | | YabA protein |
| SEQ ID NO. 2845 | LM-987.1 | From 163465 | to 164298 | Unknown |
| SEQ ID NO. 2846 | LM-988.2 | From 162467 | to 163459 | Unknown, similar to B. subtilis |
| | | | | DNA polymerase III |
| | | | | (delta subunit) |
| SEQ ID NO. 2847 | LM-990.2 | From 596580 | to 597620 | Unknown, conserved |
| | | | | hypothetical protein |
| SEQ ID NO. 2848 | LM-991.1 | From 595843 | to 596538 | Unknown, similar to |
| | | | | phosphoglycerate mutase |
| SEQ ID NO. 2849 | LM-992.1 | From 595135 | to 595842 | Unknown, similar to |
| | | | | phosphoglycerate mutase |
| SEQ ID NO. 2850 | LM-994.1 | From 593528 | to 595006 | Unknown, similar to di- |
| | | | | tripeptide ABC transporter |
| | | | | (membrane protein) |
| SEQ ID NO. 2851 | LM-995.1 | From 592257 | to 593438 | Unknown, similar to NADH- |
| | | | | dependent butanol |
| | | | | dehydrogenase |
| SEQ ID NO. 2852 | LM-996.1 | From 591412 | to 592047 | Unknown |
| SEQ ID NO. 2853 | LM-997.1 | From 590324 | to 591355 | Unknown, similar to |
| | | | | unknown protein |
| SEQ ID NO. 2854 | LM-998.1 | From 589406 | to 590248 | Unknown |

The application's sequence listing, which the Patent Office published only in electronic form, follows.

SEQUENCE LISTING (2854 sequences)

SEQ ID NO: 1 - DNA, 2944528 bp, Listeria monocytogenes (residues 1-1,472,264 of 2,944,528)
taattaaatctaacaatttcgttacagatttctttacacacaagttatacacaagttaactggctgtggacaaccgtttttcacatctggacagttttgtggatagatttggtaagtccttgctatcagagtgattttctgatattataattcctgtcgaatagaaatatagctggggaaaactaaagttatccacaatacatttttactttgtggataattttttaacagtgtttggataaccttatccatagctttttctatctgtggataactttatagcatccatttacattacataaaaagggggggtactagtgcaatcaattgaagacatctggcaggaaacactgcaaattgttaaaaaaaatatgagtaaacctagttacgatacatggatgaaatcaacaaccgctcattcacttgaaggtaacacgtttattatttcagcgcccaataattttgttcgcgattggttagagaaaagctacactcaatttatcgctaacattttgcaagaaataactggtcgcttatttgatgtccgctttattgatggcgagcaggaagaaaactttgaatacactgtgattaaaccaaatccagcattagatgaagatggcattgaaattggaaaacatatgcttaatccacgttatgtttttgatacctttgtcattggttcagggaacagatttgcccacgcagcatcacttgcagtagccgaagcaccagcgaaagcatataatccactcttcatttatggaggagttggcctcggtaaaacacatttaatgcacgcagttggccactatgttcaacaacataaagataatgcgaaagtaatgtacctttccagcgaaaaattcaccaatgagtttattagctctattcgtgataataaaaccgaagaatttcgcacaaaatatcggaatgttgatgtcttacttattgatgatattcaatttttagccggtaaagaaggaacacaagaggaatttttccatacatttaacacactttatgatgaacaaaagcaaattattatttccagtgaccgaccaccaaaagaaattcctacactggaagatcgactgagatcccgctttgaatggggcttaattactgatattacgccaccagacttagaaacccggatcgccattttacgtaaaaaagcaaaagcagacggattagatattccaaatgaagttatgctttatatcgcaaaccaaattgattcgaatattcgcgagctagaaggcgctctcatccgagtagttgcttattcttccctcgttaataaagatataacagctggtcttgcagcagaagcactaaaagatattatcccctcttctaaatcacaagttattactattagtggtattcaagaagcagtcggtgaatatttccacgttcgtttagaagattttaaagcaaaaaaacggacgaaaagtatagcattcccgcgccaaatcgccatgtatctctcaagagagcttacagatgcctcattaccaaaaatcggtgatgaatttggtggtcgagatcatacaacagttattcatgcacatgaaaaaatatcgcaactactaaaaaccgatcaagtgttgaaaaatgaccttgccgaaattgaaaaaaatttaagaaaagcacaaaatatgttttaatagacctgtgtacaatgtggataactgaaacatacttacccacaagttatcaacatgtggaaaactttatgcagcatggcttgtaacctacttatccacaaatccacagcgcctattactattactacgattttttattaattaattaaaggtttttgaggttttacaaaatataaaaaaatgggggatactcatgaaatttgttattgagcgtgatcgtcttgtccaagcagtcaatgaagttactcgtgccatctctgcaagaacaacgattccaattttaacggggataaaaatagtcgtaaatgatgaaggtgtaacactaactggtagtgattccgatatttccatcgaagcatttattccattaattgaaaatgatgaagtaattgtagaagtagagagttttggtggaattgtacttcaatcaaaatactttggcgatattgtccgtcgtttaccagaagaaaatgtagaaattgaagtaacgtctaattaccaaaccaacattagttctggtcaagcctcctttacactaaacggcttagatccaatggaatatcctaaattacctgaagtaacagatggaaaaacaattaaaattccaattaatgtactaaaaaatattgttagacaaactgtttttgctgtttctgctattgaagttcgtccagtacttactggtgtaaactggattatcaaagaaaataaactaagcgcagttgcaaccgatagtcatcgtctagctttacgtgaaattccacttgaaacagacattgatgaagaatacaatattgttattcctggaaaaagtttatctgaattaaataaacttttagatgacgcaagcgaatctattgaaatgacccttgccaacaaccaaattctttttaaattaaaagatttattattttactctcgtttacttgaaggtagttacccagatacatctcgattaattccaactgatactaaatcagaattagtcattaattccaaagcatttttacaagcaattgaccgtgcgtcgctacttgctcgcgaaaatcgtaataacgttattaaattaatgacgctggaaaatggccaagtagaagtatcctccaattctccggaagttgggaatgtttctgaaaatgtcttcagccaaagttttactggcgaagaaatcaaaatatcttttaacggtaaatacatgatggatgccctacgtgcttttgaaggtgatgatattcaaatttccttctcaggtactatgagaccatttgtacttcgaccaaaagatgcagccaatccaaatgaaattttacaattaatcacgccggttagaacttactaatctcgcaaaaaagcacatccgtcttggtttcaaggcggattctttttttgttatagtacagtttttggatagaaatgtatatttatgcaaacggaggtaattcttagcatgatgaaagatatgacaacaggtaatccgacaaaattaatttttttattcgcgatgccgatgttgattggaaacttatttcagcaattttatacgatgattgatgcggttattgttgggaaatttgtaagtgtagatgcgctagctgctgttggagcgacaaattcggtcaatttttttatgatttctttgattattggacttatgagtgggatttctgtcgtagttgcgcagtattttggatttaaagattatgatcgtttgaaagatgttattgctacggcgacttatgcggtggttttttcggcgattattttgacggttgcgggcgttttacttgcgaagccacttcttattttgttacgaacaccggcaaatattttggatgattctactatctttttaaccaccctttttatcgggattttgccgatgagtctgtataacgggatggccgcgatacttcgagctcttggaaattcgattaccccactgatttttttgattttatcgtctttaatgaatattgcattagattttttatttgttgtttatatggatatgggcgttcgcggggctgctattgcgacagttttatcccaaacagctgcagcgattgctgttatttactatgcttatcgtcacgtaccatttatgcggatagagcgtgcaaaattcaagctctccaccccactccttaaagaaatggtgcgcattgggctgccttctggattacaaggatcctttatttctatcggaaatatggctcttcaaagtttaataaatggattcggttcatcggtcgttgcggcttatacggcggcgagtcgaattgattcacttacatatcaaccaggaattgcttttggagcagcttcctccatgtttgctggtcaaaatatcggtgctggaaaaattgaccgcgttcgcgaaggtttttggtcgggaattaaagtcgttacagctatcagtattggaatcacaattttagttcaacttttcgctaggcagtttttattactatttgtagattctagtgagacggaagttattaatattggtgtgagttatttacttattgtctctttattttatgtcgtagttggaattttatttgttgttcgggaaactttgcgaggtactggagatgcgatggttcctttagcgatggggatttttgagttggtttcgagacttgttatcggatttgttttgtcgctttatattggatacgtagggctttggtgggctacaccggttgcatggataaccgcaacgatactcggcgtttggagatataaatcaggagcatggcaaaaaaaggcagttattcgacgaaaataaccattttagtaaaaaaacgccagagaagctcatattttctttttttgaataaataatatccccccattagttttgctaaaaaaagctgaaaaacgaatatatgaaaatattctttgtattattggcaaaactttagtaaaatagaaggtagtgataaaaaaagattgggcgtgaaatttttggctgaaacagtaaagataaatagtgagttcgtaacgcttggtcaacttttacaaatgattgatgtagtttcaactggtggaatggcgaaagcgtaccttagtgaaaatacgatttacatcaacggagagcaagacaatcgccgggggaaaaagcttcgtaatggcgatgttatcttagttcccggtgttggaaaagtgaaaattgagcaaggaaaataacagatgcatttagaaagtattgttttaagaaatttccggaattacgaaaacttagaactagaattttccccatctgtaaatgtttttcttggcgagaatgcacaaggtaaaaccaaccttttggaagccgtattgatgcttgctcttgcaaagtcacatcggacaacgaatgataaagattttattatgtgggaaaaagaagaagccaagatggaaggtcgaatagcaaagcacgggcaatcagtgcctttagaacttgctatcacccaaaaaggcaagcgagctaaagtaaatcatttggaacaaaagaaacttagccaatatgtcggtaacttgaatgtggttatttttgccccagaggatttatcgcttgtgaaaggcgctccaggaataagacgtcggtttttgaatatggaaattggacaaatgcagccgatttatttgcataatctaagtgaataccagcgaatattgcaacaacggaaccaatatttgaagatgttgcaaatgaaacgcaaagtagacccaatattacttgacattttgactgaacagttcgcagatgtcgccattaatttgacgaaaagacgagctgatttcattcaaaaactagaggcatatgcggcgccaattcatcaccaaatttcccgaggacttgagacgctgaaaatcgagtataaagcttccatcacgctaaatggggacgatcccgaagtgtggaaagcagatttactccaaaaaatggaatcaatcaaacaaagagaaatcgaccgtggtgtcacgcttattggaccacatcgggatgattctctgttttatattaatgggcaaaatgtgcaagattttggttcgcaaggccagcaacggacaacggcactttctataaaattagcagaaattgacctaatccatgaagaaactggtgaatatccggtccttcttctcgatgatgtgcttagtgaactcgacgattaccgtcaatcgcatttgctcggagccattgaaggaaaagtacaaacctttgtaacgacaacaagtacgagcggaatcgaccatgaaacgctcaaacaagcaacaactttctatgtagaaaaaggtacagtaaaaaaatcctaatctaggttaatataatttgatgaaaaagaaagtgcggtggaataattaatgtcagaagaaaatattacaaatgtacaagaaaatgcttcagattataacgaagatcaaatacaagtactggaaggcctagaggcagtaagaaaaagacccggtatgtacattggttcaactagccaacgcgggctccatcaccttgtatgggaaattgttgataatgcaattgatgaagcacttgctggtttttgtacagaaattgaaattacaattgaagctgataacagcattactgttcgcgataacggacgtggaattcctacagggattaatgaaaaaatcggtcgtccaacagtagaagtaatctttaccgttctgcatgctggtggtaaatttggcggcggcggatataaagtatctggcggacttcacggagttggtgcatcggtagttaatgccctttccacatctcttgaagtatacgttcaccgtgaaggtcaaaaatattaccaacgctttgaacgtggtgatgtagtaatggatatggaagaacaaggcgaaacggattatcgtggaacaattgttcactttacaccagatccacaaattttcacagaaacaacggaattcgattttgatacgcttcgtacgcgtacacgcgaacttgctttcttgaatcgtggtttaacgatttcaattgaagataagcgcgaagaacacaaagttcgtaaagatttccactatgaaggcggaattcgttcttacgtggagcatttaaataaagcaaaagacgttatccatgagccaccaatttatttggaaggtgaacgcgatgatattatggttgagatttccatgcaatataatactggattctcaagcaacatcatttcattcgcaaataacattcatacgtatgaaggcggaactcacgaatctggctttaaaacggcgttaacacgtgttattaatgactacgcgcgtcgtaataaattgtttaaagatagtgatgacaatctttctggtgaagatgttcgtgaaggtttaacggcgattatttctatcaaacacccagatccacagtttgaaggacaaaccaaaacaaaacttggaaattcagaagcccgttcaatcacggataagctattttctgaggctttaaataaatttatgatggaaaacccagatgttgctaaaaaaatcgttgagaagggcgttgtggcttctcgtgcacgtctggctgctaagcgcgcgcgtgaagttgctcgtaaaagcagtgggctagaaatttctagcttgccaggtaaattagctgactgttcttcccgtaatcctgaaatcagcgaactttacatcgttgagggtgactcagctggtggttcagctaaacaaggtcgtgaccgtttattccaagcgattttgccgattcgtggtaaaattttgaacgtggaaaaagcacgtttagaccgtattctagctaacgaagaaattcgaactatttttacagcgatgggtactggttttggtggcgattttgacgtttctaaatctcgttaccacaaattaattattatgactgatgccgatgttgatggtgcacatattcgtacactacttcttacactattttatcgttatatgcgtccactgcttgatgctggttatatctatattgcgcaaccaccgctttaccaaattaagcatggtaaacaaatagaatatgtatacagcgacggacagttagaagactatctggcttcccttgacggagacactaaatacagcattcaacgatataaaggtcttggagaaatgaacccagaacaactttgggatacaacaatgaatccggaacaccgtacactacttcaagtcaatatcaaagacgctattgatgccgatgaaacttttgaaatgttgatgggtgaccgcgtggaacctcgtcgtaaattcatcgaagacaacgcgcaatacgttaaaaacttggatgtttaataaatatttcccgggtaataattgggttattaattgtttttaaaaggtttgaactagattcagccttacttttgaaagggaggtttctctaacaatggcagaaacaccaaatcaacgaataacagagataaacttaaataaagaaatgcggacatcattcctagactatgcgatgagtgtaattgttgcccgtgccctacctgatgttcgtgacgggttaaaaccagttcaccgtcgtattctatatgcgatgaatgacttaggtatgacttctgataaagcctataaaaaatcggctcgtatcgttggtgaagtaattggtaagtatcacccccacggcgatacagcggtttattttacaatggttcgtatggcgcaagattttagttatcgtaatatgctagttgatggacatggtaactttggttcggttgatggcgatatggcagcagcgatgcgttatacagaagctcgtatgtcaaaaatttcgatggaactactgcgcgatattaataaagacacaattgattacgctgataactacgatggttctgaacgtgagccagttattttaccagcgcgtttccctaacttattagtcaatggttcgtcaggtatcgcggttggtatggcaacaaatattcctacccaccatcttggtgaagtaattgacggcgttttagcacttagtcacgatccagaaattactattcgtgatttaatggaatatattccaggccctgacttcccaactgctgggatgattatgggacgtagcggaatccgtcgcgcttacgaaagtggccgtggttcgattactgttcgtggtcgtgtcgatattgaagaaaagaaaaatggtaaagaaactatcgttattaccgaaattccttaccaagtgaataaagcacgcctagttgaacgtattgccgaactagctcgtgagaagaaaatcgacggcatcacttccctaaatgatgagtctgaccgttcaggaatgcggattgttattgaggttcgtcgtgatattagcgccagtgttatcgtgaataatttattcaaaatgacagcacttcaaactacttttggtattaatatgcttgcacttgtcgataaccatccaaaagtgcttaatttaaaagaaattctttattattatttggaacatcaaaaagtagttattcgtcgacgtacagaatttgagcttcgtaaagcagaagcacgcgcacatattttagaaggtttacgaatcgctcttgataacattgacgcgattattaaattaattcgtggatcaaaaacttccgatgttgctaaagaaggcttgatgacacaattcaacctttctgacaaacaagcgcaagccattctggacatgcgtttgcaacgtttaacaggtttagaacgcgaaaaaattgaagaagaataccaaaacttagtagcattaattaatgatttaaaagctattttagctgatgatgagcgtattcttgaaattattcgtgaagaattagaagaaatcaaagttaaatatgcggataaacgtcgtacagaaatcttggctggtgatttagtaagccttgaagatgaagacttaatccctgaagaagaagtagcaattacgctaactaaacgtggttatattaaacgtttaccactgtcgacttatcgtagtcagcgtcgaggtggtcgtggtattcaaggtatgtcaacacatgaagatgacttcgtagaacacctagttgcaacgagcacgcatgatacgttactattcttcactaacactggtaaagtttaccgttcgaaaggttatgaagtacctgaatacggtcgtaccgccaaaggtatcccaataatcaacttacttggaatcgaaagccaagaacaagtgaacgccgtgataaatctatccgaattcaccgatgatagctacctattcttcacgacgaaacatggtgtcgtgaagcgtacaaccctttctcaatttgcgaaaatccgtcaaagtggccttcgtgctgtagaacttcgtgaaaacgatgaactcatttctgttcaaatgacagatggtagcaaaaacatgattatcgcaacgaaacatggtcaatctatctacttcccagaagaaaatatccgtgtaatgggccgtacagctgctggtgttcgtggtattagacttcgtgaagacgatgaagttatcggcatggaagtactggaggacgatgaaaaagtactcgttgtaacggaaaaaggttatggtaaacaaacgccagcctcccaatatccgcttcgtaatcgtggtggtatgggtgttaaaaccgttacaatcacagagaaaaatggtaacttagtagcaatgaaaactgttactggtgaagaggacttaatgctaatgacagtaagtggcgtattaattcgtttcgaaattgatacagtatcacaaactggtcgtagcgcaatgggtgttaaactaattcgtcttgatgaagatgaaaaagtagccactgttgcaaaagtaccaaaagaagaagatgaagttgagcttgaggaagaaatcgacgaaacattaatcacgcaagttcctgatgaaagttttgaagatgctcctggaagcgacatagaagaataaaatcaagctggaaatgactctaatttgcgaattagaacgattttccagctttttttcagtataaaaaagcgctttttggatgtattttatgtataatatccttaatacgtctaaaaaagggaagagttgaaaaaatgcgcaaactgattcaatttctgtttatagcagtagttttatttttagtggaatatgttttaatcaatcaagcagctatattattcttagtaacaagtgggattatccaactatgcggggttattatcgccattcgactactcctatttgaccaacggaatactagctcaaaagtcgcctgggttgcggttatttttattttgcctgtactcggaacgattagttaccttgtgttcggtagaaatccagcaactagaaaattcagcacagctcaagtaaaggaaaaaacaaaattaattaatgcgattcatgcaattccaaacaacactaatgaaaaattgccacgactatcaaaaagaatagcgcatttaacgtccatagagccaatcaaggggaataaaatcgaaatattaacaaatggtgaggaaacttttccagtgctcctagacgcgcttagaaaggctgaaaaccacattcacattcaatattacattttcaaaacggatgcgatttctactgaaattcgtgatattttggtggaaaaggcgaaatctggtgttgaggttagatttatgtttgatggtctcggatcaagcaaactgggtaaagcctttttagctcctttgaaagaggctggagttagtattcacgcatttgatccaattgcctccccctggattgtaagaacagccaatttaagaaatcaccgtaaaatcgtggtgattgatggccaaattggctttacaggtgggcttaatattggggaagaatatcgttccaatacacctgattttcgtgtttggcgcgatacacacataaaaataacaggccaagctgtaatcgaactccaagaatccttcctaaacgattgggtatacatggaaaatcaagctggcgccgctgacgggtttattagcgaatctggttcaaaacaatatttttctccagtcgatatgggtgatgaatgggctcaagttatttacggcggaccatatgataaagaaaaatgggttcgggattcgatgcttgatttgattgattccgctaaagaatcagtttggattgtatcaccctatttcgttccagatgaggagtcgcttgcggttattcgccgggttgcgatgagtggtgttgacgtgcgggttattattcctggtaaaggcgatcgcgggatttcattccacggaagtaatgcttatgtaaaaacaatgattgaagcaggcgcgaaaatgtatgcttatgccgatgactcttttgttcatgccaaagcaatgcttgtggacggaacacgtgcggctattggaactgccaattttgacgtgcgtagttttagattgaatcatgaattaatggtattcttatatgatgaaagcgaggctatgcatcatttaaaacgtgacttcaaaaaagattttgaagatagccgactatttacgatgaaagatatggaaaacaaaccattattgactcgtataaaagaagttctatccagtttactatcaccaattttataatttaggagtggaaaaatgagtggagatttaaaacttagaccgcttgaacgagaagatttaaaatttgttcaccggttaaataatgatgcgaaaataatgtcttattggtttgaagagccatatgaggcgttcgtcgagcttcaggagctatatgataaacacattcacgaccagtcagaacgccgttttattttagagttagatggacaaatggttggattagtcgagttaatggaaattgattatattcacagaagagccgaatttcaaattattattgatcctaagtttcagggacacggttatgctgtttctgccacaaaactagcaatgaaatatgcttttcacgtactaaatatgcataaattatatttagttgtcgataaagtaaacgaaaaagcaattcatgtttatgaaaaagttggctttattcgtgaaggcgagctaattgatgagtttttcgttgatgggacttatcatgatgctattagaatgtgtattttccaacatcaataccgagaaatggatatttaaaaagtgattggcgcgggaaaagttgcgccagtcattgttttgggtcaaaaaaagttctataataaggttttagtgaaaaaattatggtatcatgaagtattaaagtttgtattattttgatggagaaaggattggcgtgcattggctacaggcattgggacagctaaaatgatattatgcggagaacatgcagttgtatacggagaaccggcaatttcagtcccatttacacaagcagtagtaacgacaaatgtagaaacttctataaaaaccaaattttcttcagcatttttttcaggtgatttagatgatatgcctgatttcttagcaggaatcaaagcattagtcgtagatgttttaaatgaaattggaaatggtgaatgtgtttcgattcatgtggtttcaggtgttccaatcggccgaggattaggttcaagtgctgctgtagcaacaagtattgcgcgtggcttatataaatactttaatcaagaattagactcgaaaaaattattagccattgtgaatgctgcagaaaaaattgctcatggcaatgctagtggtgttgatgctatcacggttgtgagtgaaaaaccagtatggtatgagcgagatcgaaaactagaaattatgcattttccaaaaaaaattacgttcgtagtagcggatactggagttccgagtgaaaccagagacgcggtgaaggatgttcaagttttatataaagaaaatcaagtagaaattggtaaaataattcatcaactcggcgatatttcccgggaaataaagacacatttagaaggcgatgcagatactgtgaagataggagctgcaatgaataaggcacaatcttatttagaaactttgacagttagtgacagtagtttagagaaattaattaaagtagctagaagtaatggcgcggacggggcaaaacttactggtggcggtagaggtggatgcattattgctgtagcgaaaaatcaagaaatcgctgaacaaataacgaaggcgcttcataatgctggagctgcacaagaatggatttttacgattggagaaggtagttatgaaagcgacagccatcgcacacacgaatgtggcgctaattaaatactggggaaaacgcgatgaacacttgattctacctgcaaacagtagtttatccttcacggtagataaattttatacaaagacaacggtagaatgggacgaaaaattaacccaagatacatttattttaaataatgaacaaaaaacggatgcaaaagtagctcgttttatagataaaatgcgggaggaattcggtatttctgcaaaagcaaaaataacttccgaaaatcacgttccaactgcagcaggacttgcttcatctgcttctgcatttgcagctcttgcgcttgctggatctaatgcagctggtagaaaagacacaaaagaatatatttccagactggctcgtttcgggtctggttctgcttctcgttccgttttcggtgattttgtcatttgggaaaaaggtgagctcgcggatggtagtgattcttttgccgttccattcacgaataaattatgtgacaaaatgtcccttgtagtcgcagtcgtttcagacaaagaaaagaaagtttccagtcgtgatggaatgcgtctaaccgttgaaacatctccttttttcgaaaactgggtttctgctgctgaaatagacttggaagaaatgaaacaagccattttagacgaagatttcatcaaagttggcgaaattacagaacgaaacggaatgaaaatgcatgcgacaacacttggtgcagagccgccatttacttattttcaaccacagtcactcgaaataatggatgctgttagagaactacgcgaaaatggtataccggcctattttacaatggatgctggaccaaatgttaaagttatttgtgagcgtgcaaatgaaaatatcgtagcagagaagttgtcaggtttggctaaaaacgttctaatttgccacgctggtaaggaagcgagtgttgtatcagatgaaaaataaactacaggttaaaatacccggaaaattatatgttgctggtgaatatgcagttgtagaatcaggtcatacggctattctaaccgcggttaaccgttatataacgctaactttagaggatagtgaacgcaatgaattatggattccacattatgaaaatccagtttcatggccagttggcggcgaacttaaacctgacggagaacattggacttttacagcggaagcaattaatatcgcgacaactttcctgaaatcagaaggaatcgagctaacacctgtgaaaatgattattgaaacagaattaatcgaccaatctggtgcaaaatatggactaggttcaagcgcagcggcgacggttgctgtaatcaacgcgctaatgacgaaattttatccagaaatatctatgctaaaaaaattcaaactagctgcactttcccatttagtcgttcaaggaaacggttcatgtggtgatattgcatcttgtatgtacggtggctggattgcgtatacgacgtttgatcaagaatgggtgaagcatcgtttagcttataaatcgctcgaatggtttatgaaagagccgtggccaatgcttcaaatcgaaacattagaagaaccagtgccgactttttctgtaggttggacgggcacacctgtaagtaccggaaaactagtttcgcaaattcatgcttttaaacaagaagatagcaagaattaccaacattttttaactagaaataatgagattatgaagcaaataattcaagctttccatacgaaagacgaggaattgctctattcagctattaaagaaaatcgtcgcattcttcaagaacttggaacaaaagctggcgtaaatattgaaacaagcttgctaaaagaactcgcggactcagctgaaaacatgggcggcgcaggaaaatcatctggctctggcggcggagactgtggaatagcattctctaaaacaaaggaactagccgaaaaactagtgaatgagtgggaaaaacttggtattaagcatttacctttccatacggggagagttcaaattactgaataaattttaagtagtaaactaagataaatagtttgctactttttttgtttcgaatttcacaatctagggaatagtgaacagaatgaaagtttgtgaaatatttaatatatcaggtttttgaactaagatatcaaatcagatataatgaattagagtatgaacatagtgattttaaaaatgcggaacaattttaaaaaagtttgtgagtttttttaaaagaactaaatagtaaaagcattttttcagttacataggagttctaacaagcttctttcagcactccggtaatggtatttttgcgcaaaaatacacattagaaaacatcaaaaggaaaagaggggattcgggtgtcaaaggtacttaaatctttgctgcttacggcactacttggggttaccggccttataagcggttgtggtgacttgacggtacttaatccaaaaggaccagttgctaaaggtcagtcggacttaattatttattcgattatatttatgctggttattgttttgacgatttttgtattgtttacgattatgttggttaaataccgcgaacggaaagacatttcaaactacgagccagatatgcacggtagtaaaaaactagaaattttttggacattgattccagttgctatcgttattgctctagctattccgacggtaaaaacaatttatgcaggggaagaagcaccaaaagtgacttcgcataaagatccaattattatttacgcaacaagtgcagattggaaatggatttttagttatccagatgagtcgattgaaacggtgaactacgtaaacattccaaccgaccgtcctgtattattcaaattaacttccgcagatacgatgacaagcttttgggttccgcaattaggtgggcaaaaatatgcgatgtctggcatgacgatgaatttatatttacaagcagatgaagttggtacatacaaaggtcgtaacgcaaacttcaacggcgaaggttttgcggatcaacgctttgatgtagtagctcaatctgaaaaagatttcaaaaaatgggcgaaagaaacaaaagcaagctcgccagttattacacaagacatatatgatcgtcttttaattcctggaagctctaagaaaaagacttattctggtacgcatttagcatttgttgatgtagcagctgatccagagtatgttttctatgcctacaaacgttttggttatgagatgacaaatccgcataatccaaacacaaaatcaaccatttctgatgaaccaatgcttccggttcgtcctgtgacagtaactaatccgcaatttgagcgtcatgatatgaagccacaaattattaaaaacggcgaaggttaccacgaggataaacaccgcgaagatgaaatgaagaaaatggaagaagacatccaaacaaatgaattcaataaaaaagaatcggatgacgcagggaagtaaaaaggggggacataaggcatgaaatggaatgagtttatcgtaactggcgatccaatgattttaggcgcgcagatttctatcgtacttgtaagtattggtgttgttgcgttactaacttatacaaaaaaatggaagtggctcatgaaagagtggatttcttccgttgatcataaaaaaattggtattatgtacttgcttgctgctgtcttaatgtttttccgtggtggtgtggatgcgctaatgatgcgtacccagctcgctttaccggatatgaaatttttagacgcacagcattacaatgaagtattttctactcacggaaccattatgattttatttatggcgatgccgtttatcatcggactgatgaacattgccgtgccacttcaaattggtgcgcgtgatgtagcatttccatttttaaacaacttgagtttttggacgttctttatgggagcgatgctatttaacttatcattcgtaattggtggttcgccagacgctggttggacaaactatgcgccacttgcgacagattttagcgcgggatatggaattaacttctatcttttaggtgttcaaatcgctggtattggtacgctgatgacggggattaactttttcgttacgattttaagaatgcgtacaaaaggtatgacgttaatgaaaatgccaatgtttacttggtcttcattaattacaagtttgatcattattttcgctttcccagttttaacagtggcacttgctttgatgtcatttgaccgactgtttgggacagcattcttcacactcacgaatggtgggctcccaatgatgtgggccaacttgttctgggtttgggggcatccggaagtatatattgttattttgccagctttcggtattttctcagagattatttctactttctcgaggaaaaaattattcggttatccggcgatggttgccgcgatggcagttatttctttactaagtttcctagtttgggtccatcacttctttacaatgggatcaggggcgcttgttaactccttcttctccattacaacgatgatgattgcgataccgaccgggattaagatattcaactggctctttacgatgtacaaagggcgaataacctttacaacgccaatgctttggtcgcttgcctttatccctaactttgttgttggtggggtaactggggttatgcttgcgatggctgcggccgattatcaatatcacaatacgtacttcttagtatcccatttccactacgtattaattgctggaaccgtgttctcctgctttgccgggcttacatactggtatccaaaaatggtcggttacagactaaatgaaaaaattggtaaatggttcttctggattttcgttgttggatttaacgtttgtttcttcccgcaatatttcctaggactagatggtatgccgcgtcgtatttacacttacgtacaaggtgatggctggacaacgcttaactttatctctacagttggcggattcttgatgggtgtggcattcttagttctttgctacaacatctactacagctacaaaaactctaaacgtgaagttactggtgacccgtgggatgctcgtacgcttgaatgggctacaagttctgcagttcctccaaaatataactttgctgttttaccagaatggaatgacttggatgatttctggaatagaaaacaaaaaggcgatccatatgtaaatgataaaaattataaaccaatccatatgccaagtaataccatggttgggtttgtaatgtctgtcttcttcttcattgcaggtttcggactagtcttctactggtactggatgggaattattggtctagttggtattttaggatgtatgatttatcgttcattccaaaataacgatggttaccacgttgaagtggaagaaattaaagcaacagaagaacataatgcgcgcgaacttgcgactggtgtgaaggagggaaacccatggaatctgtagaaacaaataaaaatctgccaattgaatatagatcagaacaaggtcgattaaatattcttggattctggattttccttggcgccgaaattgcattgtttgcaacgctttttgcgacttactttgttatgaggaaggctggctcgaatgcggggcatccgccagcagaaatgttcgaactttggctagtgctaataatgacatttttacttttaacaagtagttttacgtgtggtctagcaattggtgaaatgcgtaaaggcaatgtgaaaatgttgacgatttactcgattatcacattaattcttggtgcgggatttgttggctttgagctttatgaatttgcacactatgtgacagaaggagttacgatgcaagttggttcttactggtcggcattcttcgttctactaggaacacatggacttcacgtaacggtcgggattttctggattagttttattctgattcaaattaaaatgcatggtttgacgccaaaaacagcatcaaaagtatttatttccagtttatactggcatttcttggatgttgtgtggattttcattttcaccggtgtctatttgctagggatggtgaactaatatgacacaaaataataaatcaaatgcagcacatgcagaaggtggcattccttggaaacatattgttggctttgcgctatcggttgttttgacgcttctagcagtctgggtagctctttattcaacgcttacaacaaatgttaaggtagttattattttcatctttgcgttcattcaggcagccctacagcttctgatgttcatgcatatgacagaaggccgcgatggtaaaatccaaatcggtaatattttattcgcagcatttattgcgattgtcgtagttattggttcttattgggtaatggaaattggccatatgaatcatttgttataaaaaataagctgatgcatggaacggtatacaccgaactagcatcagctttttttattttgcggaaatatcaccattactattaatggttgcatttggagaaatggattgcaggtaatttaattgtgctgtcttggaagaaccttcaagcatattaatttgattgcctgaaataataccaggatcaaaatgggcagttactttaccttgatcaaaattcagtttataaatacctgtttctgccgaatgacctgaaacatagtcagggaataagaaattacctaatgaataagcaattggaacatctttgtatacttcaaaaccttggagccagtgtggatggctagcaacaatcgcatccactaaattatcatccacgagttttttaacgtattgggtttgataatctacaggtgtattcgtcttttcaactccccagtgaaaatagacgaccatataatcaatatctttattttttgcgcgttcttctttgattttttcttcgacaaggtttaaatcataaccattagtaacccctggagtatcttcgtcggcaatccaacccgtattcgggaaaaagtggcaaaacgacatgaaaccaactttgtttcctttgatgtcagcaactttaagttgataggcttcatcttcatttttaccggcgccaacataggctaggttattggcgcgtaaagcagccgttgtgtcgagtaatccatcttcgtaatagtctaaaatgtggttattactaatattaaccatatcaacccctgcatttttaagagctgttaaagaactaggatcacttttaatccaaaattcttggtaggggactttttttgttcgagttgtaatagctgtttctaaatcaacaaatgtatagtcgctcgatttcagttcctcgcgaacattattaaaaggataatccattcccttctctgctaaaacggggcgtaaatcccaatcaaacataatatcacctgtaaaatcaatgttaaatggttcttttggttttggaggtgtctcttttttctttttaacagcagcgacggttttcttttttggcttagcagtatctttgttgtttgtcatgaggttgttcactaataaaccaatggaaaagattagaataacggacagtactaagataatccctttttttcttgatttcattttttctcctcctaaattaaaaagttatctaattctatcagtatggagaaaaaggtttttatcgaaaatagacttttttatggattttaatggctaaattgtgaactttaaaatcataaaatggaagacgaatttaaaaaaattgaaattattgcttgctatgtaatgcattacatattctatagtggaaaagtaaattatattcgtgagaggagatatacaaaaatgacagaatcaaaatttcctaaagactttttatggggcggagcagttgctgccaaccaatgtgaaggagcttatcttgaagacggtaaaggactttcacttgttgatatccttccaacagtagaggacggacgttgggaagctttattcaatccatcgaaagcgcttgctacagattatggtttttacccaagtcacgaatcaattgatttttatcatcgttataaagaagacattaaattaatggctgaaatgggattcaaatgtttccgtatgtccatcagttggccacgtattttcccgaatggtgatgaaacgacaccaaatgaaaaaggtttagcattttatgatgcagtttttgatgaatgtcacaaatatggtatcgaaccagttgttacaatcaaccattttgatactccgctagaagttttcaaaaaatatggtggttggaaaaatcgtaaatgcatcgacttttacttgaatttctgtgaagcaattttcacgcgttataaagataaagtaaaatattggatgacatttaatgaaattaacatgattcttcatcttccatacattggtggaggtttagacgttactaaagaggataatccagaggaagttaaatatcaagctgctcatcatcaattagttgcatcagcacttgcaactaaacttggtcatgaaatcaatcctgaaaatcaaatcggttgtatgcttgcagcgggtaacacatatccaatgacttgtaatccaaaagatgtctggaagtctatcgaggcggaccgtgaaggctacttcttcattgatgttcaagcacgcggatactacccaagctacactaaacgtttcttcaaagaacataacatcaacatcaaaatggaagatggcgacttagacgcattacgcgatcacacagttgattatgtggcattcagctactattcttctcgtctaacaagcgcagatccagagaaaaacaaagaaacagaaggcaacgttttcgcaacactaaaaaacccatacctaaaagcaagcgaatggggctggcaaattgatccactaggtctacgtattactatgaatacaatttacgaccgttaccaaaaaccacttttcatcgttgaaaatggcttaggtgcagtggatactgtggaagaagacggctcaatcactgacgattacagaatcgactacatgcgtgaacatgttcgcgaaatgggcgaagcaatcgaggacggagtagaacttcttggctatacaccgtggggctgcatcgatcttgtcagcgctggctctggcgaaatgaaaaaacgctacggcttcatctatgttgaccgcgacaacaaaggcaacggaacattaaaccgctcgaagaaaaaatcattcgactggtacaaaaaagtaattgaaacaaatggtaaagatatcgactagtatatcaaaaacccccactttcatcatcgaaagtgggggttttattttaatacgaaatcgcgcgttttgcttgtttgctccaacatgtattaaagtaactttgcgaaattcgtgcatttttttgaccagaccagctgtcattgtagtaaaaattatttttatcataaccggtaatggtgattgcgtgaacggaaaaaccgtggaatttactcacccaagctacaactggacgttttttattcaactgatttttaataccagctaaatttgttccagtcatattcttcgcgctcccagtatattttttaacttgattaactaaagccggtggataaatcgtccaaccgctcttagaaaatggattcccgacaaaaccataatttggattggatttatgacgcttcatttctttggcaagttttactttatcaacattttttccagcatagcgcagcatcatcgcaatgtttgtaatctcgcaacctgttggtaattgtggacgctgaacgattaatggcacgttcatttgcacaatttttggcgttggaggttttggagtcggagttgcagttgcggcttttacatatttcccagatacgtagccgtttttccctttaaagctaaagcgataccagttgttcgatgtttttgcaatcgctttgaactttgtattgttcttaagccagccaataactttcccagaagtcgaattagttgaacgaacattaaggcttgcagttgttaccatttgcttgttaatcacagtctcttttgccgccgcctgaccagctgtagaaacactaaaaacactgaacactaatccaaggacaagtatccacttcccccatttactaaaaaaagtccccattatatccccctttgatacagattacttatgtataccctattttggaaaaataaaaagaaaacgcttgcataaatgaagtggccgtgatactataaaaatgaacttaacgtgttaaccggttattgttaaaaagttcagtgattgcaagctaattcaagtttgcaatcaaaaaattatcatggtaccattaacctaaaacttaacgtgttaacgcgcgggatgctttagggggaacttgttatggcggaaccaaaatacgctattattatcaatgatatcaagcgattaattagtgatggaacttttaagccaggggaaaaaatttattcagaagatgaactgaaaaagaagtataatgttagtaatactacggttgttcgcgccttacacgaattagtacgagctgggattttagctcgttatcaaggaaaaggcacatacgtaagtaagtctattatcaacgaagaagttatttttaatgaatatacgacagtgccgaacggaagattcaatcgcaaaacaaaaattactaacgaacatacaaaagtagttgcaataaatgaaattcaggatgcgcgaattgctaaaaaattgcagattccacctgaaaatatgattgttcattttcaacgaatccgccttattgatgatttaccttggactgttcaaaacaactatatggcaaaatccaatttgatcaatgtcgatttaacaaattttgaaaagtttaattctttatctgaagtgattaaagagctttatggcattaatattctgcacgaagcgatgaaagagagaattgaagttgaatttccagtaaaagataaaaataatttcaaattactcgaaattgatactgaattgccactttaccatattgaaagaataacttatgtgcctgaggggcaaccctatgaatatattgaaagctatttacggcataatttttactctattgaaattgaaaagaaaaaacaatagaagggagttaattacttggattatattatcgcagcacatggtcggtatgcgcaggaagtaaaagatagctgccaaatgattactggccaaacaactaatatttcagcaattacttttactgaagaaatgggggtgacggatgtattagatgcctacatggcagtttattcacctgtaaatgaaaccgctatcattgtggatattgttggtggaactccgtgtaatgcggctcaaatgtttagtacaaaacatccagaagttaaagttgtatcaggtttgtcgctaggattaatcattccacttagccttggagaaagtttagaggaggcgatgcttggagcaaaagataatattcaatttgtagagcaaaaagcgagtcatacgatagtaagtgatgatggggaggaagaggactgatgggaagcaacggaattaaacacgtacgcgtagatgaaagactaattcacggacaagtagcaacaatgtggaccaatactataaaagcaacgcgaatcatgattgttgatgatgcagttgtaaaaaatgaaatggaaaaagttgccttaaaaaccgcagtacctgctggtgtcaaactaagcattctgacagtaaaaggtgcagcaaataatatcaataatgataaatacgcagggcagcaagttttcttaatcgtaaaatcacctcatgctcttcgcggtttagtggatgcgggcgtagaacttccccaaatcaatgttggaaatatgtcgactaaagcagggagtcgccaaataaaaaaatcagttagcgtgacagatgaaaatttggaagattttgattatttggctcaaaaaggcattaaaatcactgctcaaatggttccgagtgaagatgcagttgaatttgcaaatttattaaaaaaataagttataagaagggagaactacaatggatttagcaatttggcagattatattgttagttatacttgcagcttgtaccattcttgatgctttaactttagtaataggacttaatttccctgtaataacaggaacgcttgctggaatcattatgggtgatatggtgctcggacttgcaattggggcaacgttacagctgatggttctaggtgttggtacatacggcggtgcgtcgattcctgactttacaacgggagcaatcgtcggaacagtatttgccgttttatcaggtcaggatgcggaatttgcgattggccttgcaattccagtggggcttttaatggttcaattagatattttagcaagatttactaatacgtttttcttgcaccgcattgattctaacatcgcttcaggaaacatctcagcagttaaaaggaatatttggtacggcgcattaccatgggctttatcgcgcgcggttccagtatttatcatgttgactttcggacaaagcgtggttgattttattcttaacgaaattccagaatggctaatgggtggactacgtgtagctggtggaattcttccagtagttggtattgcgattctccttcgttacttgccaacaaacaaattcgtcgcttatttaattatcggatttgtagcagcagcttatctaaaagtaccaatgctaggcgtagcgctaattggtgtagcattagcaatcatctacttcaaacaaaatttcaaaaatccagtagctgcaggagcaaatggtgcagcgctagttggggaggagaatgaagatggcgaatacgaagactgagcaggattttgagaaagtcctcaagagacgcgatttaatagcagcaaactttcgttggttgtttgccagccaaatctgttggaactatgagcgaatgatgtcgactggttatctttatagtattttgccaacgcttcggaagctttataaaactgatgatgatttaaaagatatgatgaatatgcataaccaattctttaatacaaatcctatggtcggtggtttgattttaggaatggatatggcgattgaagagcgagaaaagaaagcatcaaaagaagtcgtaactggtttgaagactggattaatgggaccgtttgctggtgttggtgatacgattttcggggttattttaccgacgatttttggatcaattgccgcatatatgggacttcaaggtaatgtgacaggtgtagttatctgggtattagtaaatattttggttgtgggagctagatttactttacttcctctaggatataagcaaggtgcgaaactagtgacggaattcgcggatagacttaacgcgttaaccgatgcagctattttgctcggggtcacggtcgtcggggcattaataccaaccgtaattaaagcaactgtcccattcgtttataaatcaggaaaagtagagctcaaaatgcaagacatgctagatcaaatcatgccatcactcgttccagtcttacttgtggcactaatctatgcacttttaggccacaaaaaaatgacatctacgaaggctattttattagtaatggttattgcgattattttattcaacctaaaaattctaggttaaaatataaaaattggaggaatagacaaaatgggtttaacattttttgacaaagcgcgtgaattaacggaggaactagaaaaaacacaggcggaaagtattcatcaagcagcaaaactggtggcagacagcattatgaacgacggaattattcaagcatttggtagtgggcactcatatgcggcagctattgaagtatgtgggagagcaggaggacttattccctcgaaagttattatggaccctgctggcggttattatgaatctattgagggcgttggttccttgcttactcatagattacaagctaaaccgaatgatatattcttccttatatctaattcaggtcgtaatccaatgggaattgagcttgcagaatggattaaatcacagggctgtaaattaattgttgtaacagcactcgatgcctcgcaaacagcagcttcgagacactcttctggaaaattgttgtacgagtttgcggatgttattttagataatcgttcagtccaaggggatgcggcacttgaattagagggattagaaggaaaagtttgtggaacctcttcattctcagccgttctgcttctccaacaaacaatctatgaagcagtagaacttatgcttgaaaaaggctatacaccaccagtttatcgtagtgcaaatattgatggtggctacgaatacaattttgcgattgaagacaaattcgctgatcgtattttccacttataataaaaatgggcgcgaaaatgaacgttattttcgcgcttttttggaggcaaaatgatgattttaaaagaagtctgtattgaaaatactactaatttggtgaacgttattgaagctggagctaatcgagttgagctttgtgataatctagcggagggcggaacttctgttagttatggggttgcgaaacatgttgtgaaaatttgtcatgaacaaaatgtaagtgtaatggcaatggtccgtccccgaaaaggcaattttgtttatacaaaagaagaaatttcggttatgattgatgacattttgatgtacaagaaaatagcggttgatggcgtggtttttggctgtattacggattctggattgctagataaaccagccataaatgaattattgaaagctgcagcaggtctggaagtgacttttcatatggcgtttgatgagttagtagaaacagaaaaattatcggcaatagactggttagttgagcaaggcgttacaagaattctcacgcatggtggtgacggcgctaaacttcccgaagaaacttttgttcaatggcgaaaatatattgattacgcagcgggtcgaatcattattttaccaggtggaggaattaaatcgcacaatttagaatggattataaaagaaactggagcagctgaaatacatggcactgacttgtttggggagcgctaaaactccccaaataaatttattttaaaaaaatgcttgcaaccgttttctttatatgatatatttatctcatcacaaaggattgttaccaattcattgggcaaaacctaagctgatttgtaggacacgtgtatgcgtggagtcctcgaatgagcttaggtttttctttttgcccaaaaaaccaaaaagaggaaggaagtcgtcaaaatgaaatatgaacaattagcaaaagacatcttgaaaaatgtcggcggtaaagaaaatatcaacagtgttttccattgtattaccagacttcggtttaaactgaaagatgagaatattgcgaacacgaaagaaattgaaaaacttgatggcgtaatctctgtcattaaaagtggtggtcaataccaagtagttatcggtaaccacgtaccagacgtatttaaagcagtattagaagttggcgggatttcagctgaaggtgacgaaggaagtagtgcaccagcaacaggtaatatcttcaaccgcttcatcgatatgatttctggcgtatttacaccagttctaggtgtattagccgcaacaggtatgattaaaggtttcacggcaatgtttgtagcatttggttggattacagttacttcaggtacgtaccaattactttatgcaattggggattgtttattctacttcttcccaatcttcctaggttacacagcaatgaaaaaattcggcggaaacatatttatcgggatggctataggtggtgccttagtttatccaacacttgcaggtattacagcaggtgacccactttatacacttttcgcaggaacaatttttgaatctccaattcacgtaacatttttaggaattccagttatcttgatgtcttatgcatcttctgttattccgattatcgtagcaacatattttggttccaaagtagaaaaaggcttcaagaaaatcattccagatgtaattaaaactttcgtagttccattctgtacattattaatcgtagttccaatcactttcatcgtaattggcccaattgctacatgggctggtcaattattaggagcaggaacaatttgggtttataacttaagtccaattatcgcaggtctaattttaggtggtttctggcaagtatttgttatctttggacttcactggggtcttgtaccagtggcaatcaacaatttaactgttcttggacatgatccaattttagcaatgacatttggtgcatcttttgctcaaatcggtgcagtattggcagtattctttaaatctagaaacaaaaaaatcaaatctcttagtatcccagcatttatttccggtatctttggtgtaactgaaccagcgatttacggtgttactttacctctgaaaaaaccatttatcatgagctgtatcgctggtggtattggtggcggaatcattggttttgcaggatctcaaacatatatcatgggtggacttggaatcttcggtcttcctaacttcttcaaaccaggtagcggtatttcaggcgaattctggtgggtagttatcgcaatcgttatcagcttcatccttggtttcatcttaacttatgtagtaggtttcaaagatccagctgatgtagtagtagaacaatctaacacagtagaaggcgaaactttaatcgaacgtgaaacaattccagctccagtagttggcgaaatcgtaactttagcagatgtaaaagacgaagcattttcatccggtgcacttggaaaaggtgttgcaattatccctactgtcggacgcgttgtagctccagcagccggaacagtaacaactatcttcccaactggtcatgcaatcggtattacaacaaaagatggtgcagaagttttaatccacatcggtatggacactgttcaacttgaaggtaaattcttcacagcacacgttaagcaaggcgacgtaatcgaaaaaggtcaattactaactgaatttgatattgaaggcattaaagcagctggatatgacgttacaactccagtagtagtaacaaactccaatcaatatttagacgtaatgattacagatgcaaaagaagcaaaactagaagaacgtttaatcacactagtaatctaagacttttaaataaacagcttgggcagtaacttgctcaagctgtttttatgttatactgagaaaaaacggacggtgaagcacctatgctagtaaaaggcgatacagtgggaattatttgttgttctgatggtcggaaaaaagaagatgagaacagaattgcactgcttgagcaagtgctaaaaacagaatttagcttgcaagtagtttttgctgaaactatttttcaaaaagctgaatcgccatttagtggtactccgcaagctcgtgcgatagaactgatgaaattataccagcgttcagatgtgcaaatgatttttgatatttctggtggagatgcagccaatcaagtattgccttatcttgattttgatattatccgaaatgcgcaaaaaccgtttgttggctatagtgatctaacggtgattttgaatgctatttatacgaaaacagaacaaatgggttataattatcaattacttcatttagtcggtaaagatagtgagttacagcagagtcattttagaaaaacattttttgaaaatcgtgtattaattagcggagagcagcttaatgagtttgtgtggcgtggtggcgaagttattggaggaaacattcgttgctttttaaagttagcaggaacaaattttatgcctgatttcactaataaaataattttgttagaaagtctcggtgggaaagaggcgaagcttgcctcatatgtggctcaattagagcaattaggagcgttttctaaatgtttaggcgttattgtgggacaacattccgaagcggaggaaaacggtgaatatgaaagaattggtcgcttatatcaacaaattggtcggaagtataagttgccgattttccgaacaagcgaaatagggcatagtgtagatgcaaaaccatgcttaattggtgcaaaagttaatgtttcacgtgaaacattaacaaatttttaataattttattgcgaaatgttcataattaacctttaatatagaacttgtaagcaaggaatacaattagttttactccctttttgctaattgtaaacttccttaaaatcctaaactcccttttttggaccgacttgattgtcggtctttttttaatctttcaagctgataactattcaattttttgttaaaatgataacatgaaagaaaatgcgtataaaaaaggagtttttatcatgaaagttgaaggattacttggctttttaggggcggcactgggtattggatttagtttgatggttctagttattcctgatatttcacaggcattagaagaggagtcatttttcttctatatgttaacgattggttcacttgtactttcaggagtggggcttgcaggatcgtttattgtttcgcataagccgcgtcttggtggggcgatgatggttgcagctgcaattggctgtacaatgtcgatttcgattatgttcttactaccaatcgtattacttgctgttggcggactaattgcactaattaactatgaagaagctgcttcagtagaagaataaatgaaaaaaagctgtccacgtgggcagcttttttattaacgattaagatgttttttcaaaaagtagtaaattccatcggcatcatttgcagtagtaacaaaatcagcactttttttcactagttcactcgcattttccatcgcaacccctgcaccagctacttcaagcatcccaatatcattttcaccatcaccaaaagtaatcacattttctggcttgatatttaaatgtgccgcgagatttttcacggcatattttttatccatatcttttggtaagatttcaatattattggcatgggaagaaaggatagaaacatcggagagtttttctagatcactgcgaaggactgcgagtttgtcgaaatcttcttcctcgattacgataccattaatgaactggtccgcatgctcaaggaaaatttctcttgatttaatcgctacgagttttgtggcgtttactcggcctttatcttcttcatccgtaaaataatatggtggatttttagtgtagaaaactgtatctgttgaaaagaaaaatactggtaaatcatgattttggcataataaaaatgtctcgagtaacgcagattgtttcattttttcttgttgaatgatttcgccggatactgcgaccacaccgccgtttgaggcaatgacatctgcttttggatgaacaagtttggcgaagtctgttgcggaattgtacattcgaccagtggaaacggcaaaatggtgaccttcttctattagttgttgcaataaatttagtgtttttggtgagatagtttgattttttagcagtaatgttccatctaaatcagaacaaattaagtatttttccaagtggaccttcctttcgttatagcttagagccgcaagattcgcggataattagttctggattatggttgataatcattggctcgacttgaccgttaatggcgctaattagttgtaaaatagccattttaccaagatattcattgtgttgatccatggaagttaaacgcggagtttggtaatcgccattcataaattgatcacagctgacaatagcgatgtcttcagggcaagagagtttggcatcgttaatcgcccgaattgccccgatagcgacattatcattgatagctacaagcgctgtcggcaaagtagtgctattttctaaaaggtgagtcatcgccgcgtaaccatcagccgtataataatcagatagaactacccagtcgtcatttaccggatgttgatagctagtcattgcttctttaaaagattctagtcggtaggtggtaatttttacaccagcttctccgccaataaaaccaatatttttatgcccaagtgcagttagatgactaactaaggttgttacacctttttttaaattacgttcaataaataaacagttgagctcagggatttttgacccgataacaactactggaattgcattatttaattgatttagagcagttatatactcttttggaacgatttctttatcgatttctccacctaaaataagtaaaccatccacttgcttttctaaaatgattttcaagtaatcttcttccgttaggggatgttgattattcttattatctggctccgcaagcattgtattgaacaaaatcgtcgaaaacatataatctagcgcgaatttttgaatttgcgttataagtgaaatgaaatagggattagaaatatctggtaaaataacgcctatattcttcgtctgcttattgaccatcccacgagcaaacacgctaggtgtgtaattatgttcatcaatgattgcttggatttttttgcgtttcgcagctgaaacagaaggactgttattaagaacccgcgaaacagttgaaacggagacaccactaagtttagctatttcttgtatagttatttttttcattcgaaatgttcacctcgtaagcatttttaactattttaagtgtagcgtatttatgggtaaataacaagtaaattttggtaacgttatcaaaaatatgataaaaagggttgacatattaaaaatatccggttattctatgttagaaagcgctatcaacaaatgttttaatttggtaacgttaccaaaaatgaggtggaatagttggacatacaagaatctgtcatcggaattgatctaggtggcactaaaattttaattggcgaagtaacgaaagatggtgaggtgctaaattccaagagttatccaagtaatacggagaatcagaccaaagctaccgaaacattgttgaaggtattagctgattacacacaaaatattggttttatagcaccaaaacaaacgggtattggtgtggggctagttggtcgtgtggatcacaagtcaggtgtttggttagagattgaacctggaaaaagcaatccaaccccgcttgcaggcattttagaagcaaaaacaggattacctgtaagtctgggtaatgatgttgtttgtgcaacaatggccgaaaagcaatttggttggggacgggaaacaaacgattttatttatttaaatgttggaactggtcttgctgctgggtttgtggtggatggacgaattacacaaggcgggcactttaacgctggtgaagtcggtcatgcagtagtggatattcatagcgatgtactctgtggttgcggtagacgtggttgtgtggaacgacttgcttccggtcttgggattaaagaagaggcgctgagacatttgaatagctatccgacatccatacttgctgaaactcaaacagaactaactggaaaaatggttcttcatgcagcggagcaaaaagatgagcttgcagagaaaattattgataatgcaacgtttcagctagcaaatttgattatgaatttagttcgtacaaccgatcctgaatgcgtaattcttggcggaggcgtgacgagaaatgagcattttttccaaaagatacaagataatcttcaaagcaatacaattcgttttgttacaaaaggcgttgtccgctctaagcttgagaaggataaagttggtttaattggcgcagccgttattggaatgagactaggaaatgaaggaggaaaagaatgaagccaagtatgaaacgacaaattgcgcaaactggtattattcatcgaccactccctattgaaaccgagcacgcattagaaactttagcgaaaaagaaacaagttttatcaagtagaacattatttagctctaaacagcatgtttctttagagtttacacatcaaggagcaggagattttactatttctggccaagatgaaattaagctttcttcgcctgtggttatgccacattggcccgctggtgctccggatgacggtgattatactaattttggtaacgttaccatatcggcgtcgattggaaatgaggactggagcggctttaatcgtgtgcgaatccaagttttccctgattttcctggagtgacaaacccctatttaatgattagttttaaaaacgacggaaccgtgaaagtgcctgatatatatgggcgagaaggtgttcatggtgtgaatttaatcaaccatgaatggaatgatgtcatttttgaaattgaaggtttaccgcgcgaccgaatgactgaaatgagttttagctattacttgaatggcccagagcgactgactgctggaacgatggaattatttattaatgaaattaaattagaacaaatcagtgagccggagatttccaagggctggcttccgcaaaataacacgctaatctattctcataacggttactccaaagacatgccaaaagtggcgttttgtgcgaacaagcatgctgcgactacatttacaattcacgacaaagaaacagacaaagttgttttcactggaaaaagttaccaaaatgcaacagaaactggcaatttcgttattcttgatttttctgatttacaaactgtgggtgaatactatttaaaatttgcggatatgcaaacggaaattttccaaattgggacttccgaagtgatctgggaatcttctatctggaaatcgcttaactttattttctgcgaacgttgcggttgcccggtttttgggaaacatacgacttgtcacgcagatattatcgctgaacatgatgggaaacagttgtcatttaatggtggatggcatgatgcgggcgatgtttcgcagcagcttattcaaacagcagaagtaacgatggctttatatgaaatggctgcgagtttacctgaaaaagaggaaacgttgcggatgcgccttttagaagaaggcgagtggggcctagatttcattttgaaaacgcgcttcggagatggttttagggcgactagcgcaggtatgacgagatggacggatgggcttgttggtgggatggatgatgcaattgcgcgcgttcataaccaagcttatgagaacttttattgtgccgggattgaagcgtatattggcagccaaattgcggataatgctactatgcagaatcatttgctgagaatcgcggaagaggatttgctttttgcgataaaggaactggaaaaacacggaacaagtcaaaagccgattttctgggagcatacgtatcaaacctcagaaagtctatattatgcgactgcttcttgggcggcttcgatggtttatcaactaacaaacaaagaaatatatgcagaaaaagcggccgaatggttagatttgatgctagaagcgcaagaaaaagctggaattagagacagcgaaactagcgaactttacaaaggatttttctaccgcgataaatcacacaaggtcattcaacattttaatcatcaagcacgcgaacatctttatttactggcgctagaggcggcgcttgaaacgcaaccgagtcacgctgaaaaacaaacttggctacaagcggtcgaaatgtacggcgattatttgaaaaaagtaacacgtttcactaaaccatacccgctcattccagcaggactttacaaaaaagatgagtatttagacgaagcaagtttccacttacaacatttactcattgatgaacgagcgatagaagaataccaattacaattcgagcaaggtatcaaaataaacgacgaggtagctttgcggaaattcccaatttggttctcgtttagaggaaataacgctattttactttcggcaggaaaagccgcatcaattgctgggaaaattttgaaagataaggcgcttttagatattgcggaaggtcaattgcagtgggtaattggaatgaacccatttggacaatcaatgatgcacggtgaaggttatcgctacgcacagcaatacagtgtactaaatggcgaaatcacaggagaaataccagtcggaatggaaacctttagaaatgaagatgaaccatactggccggagtttaataatgcaacttataaggaagtttgggtcggtaatgccggcaaatggatgtcaattgtagcagatttaaacaaaataacaggaaagtcataggaggacaaaaaaatgagttcagagagaagtttatctagccgatttattgaaggattatcaatttttgcccaaaaaatttcatcgcaaaagcatatcatggcaattcgtgatggctttgcagcgatgattccgattacgattattgcagcatttttcttacttgtaaataatgtgttgcttcaaccagaaaacggtctgcttaaatttattccaaatgtagaaaattatttgggtgtaggtattcaagtctataacgcgacacttggtattatggcgattttagcagcattcttaattggtaactttttagctaaatcatatggaatggaaggtcgtacggaaggggttatcgctgtagctgcttatgttgttttaataccggcatcttctcatttaatgtctgttgatggaaaagcttttgaagcgggcggcgttttaactcaagaaatgacaagttcaacaggtatgttccttgcgattatcgctgctttagttagtattacaatgcttgcaaaattctcgaaaagtaaaaaattaaagatttctatgccagaaagtgttcctccggcaattgcaaaatcatttaacattttaattccatcattcttagttctaagtattttagcaattattgaagtacttgtagtcagtttcgtatcaatgagtatcccagaaattatcgtaaaagtactacaaattccattagttggtgggttccaaacgttaccaggaattctactttatgtattcttagcgggattcttatgggtcttcggtattcatggcgcgttcgtattaggtgcgatttccggaccagttcttttaacttctttacaacaaaacattgatgcagtgaatgcagggactgctttaccaaacatcgttacacaaccatttttagatgcttttgtatacatgggtggcggtggaacaatcatctgtttagttatcgcaatctttattgcttctaaacgaccggatcaccgcatggtaacaaaatttggtttgattccgagtattttcaatgtcagcgaaccactaatgttcggtctgccagttgtatttaacccgatttatggtatcccattggttattgcgccgctagcttcgactgcaatggcgtacttcgcaacttcgtggggctggattagccagacttatattttgattccttgggtgactccaccagtgctttcaggttaccttgcgacaggcggagacattcgcgcttccatccttcaaatcgcaattattatcgttggaacgctgatttacctaccatttgtacttgtagcaaaccgcgcgtacgtgttagaacaaaaagctgctgggaaagtagaagcagtaacgaatggagaagtttaaaatgaaaccaacaatgatgacttatattaatgaagaagaggaaatgtgtcgagcgattttagccaatttccaaacaaatgcagaaaaattagaatcactcgtaaaaaatggcgcaaaagaatggttaattttagcaactggatcaagcttaaatgcagctcaaagcgccaaatattacattgaaaatatcgcagatgtccgtattactgttgaagaacctttcaaccatctatattacgaaaaactatcaaaccacctagatctagtcatcggaatttcgcaaagcggtcaaagcacatcgactatttctgcgctagaacgagtgaaaaaagaagcttccgttccagtagtcgccctaactagtgatgtaacgagtgaaattgctgaatttgcggatattacgcttgatatcggctccggaaaagaacgagttggctacgtaacaaaaggttttacagcaacagttctaacattaatgctgacaggacttcattttgcatacaaaacagcacaaattgatgaaaccaagttcaataatgaaatcaatgcatttagccgagcaaccaacgcaatcccagcaacaattgccgaaacagaagcattttatgaaagatggcaagaggaattcgctactgcaccgaagtttacagcaattggatatggtcctactgttggaacgtgcaaagaatttgaaacaaaattctcagaaactgtccgcgtgccatcacaaggtcttgatttagaagcgtttatgcatgggccatatttagaagtaaatccacagcatagaatcttctttttagaaacagaaagcgccgttaccgaacgattagtagcgttgcgcaattatgaatctaaatatacaccgtttacgtatacagttaaatttggtacagctggaaatgaccgaacgctattgataccagcagatttagacgaataccaagcgccgttcctaatgattcttcctttccaaattttagcgcatcatattgcggagttgaagggaaataaattaacagaacgtatctacacggactttggcgtagcgatgaagagtaaaacaaaaccaggtgactatgcataagagaggctaatagactggaaaaacccgtataaggagggtttttccagtcttctttttgtatttgggtcacatgttacgcagaatgtaacgagttacagggtgattcggtctgttcttaaaaaaagaaaacgtattcaaaaataatctcttttgtactatgatgagcatgtggcaaggaaatactcgagtatgccccagaaaaggtttagaaaataaatggttgaggtgatagaaatgaacaaaaaaagagattttatcgacacaaaagatttttctaaagaagaaatactatttatgatagaaatcggtcgcaaaatgaaagaatctattaaaaacggtcattacccacaacttttaaaacataagacgcttggtatgatttttgaacaatcatcaacaagaactcgtgtatcttttgaaacagcaatgacacagcttggtggtcatgcgcaatatttagctcctggacaaattcagctcggtggacatgaatcagtaggcgatacagccaaagttctttctagattagtagatatattgatggcgcgtgttgaacgtcatcaaacagtagtagaacttgcaaatacagctgctattccggttattaatgggatgagtgattacaaccatccaacacaagaattaggtgatgcaattactatgtttgaacaccttccaaaaggaaaaaagattgaagactgcaaaattgtctttgtaggagatgctactcaagtatgtgcatctacaatgtttatggcaacaaaacttggaatggatttcgttcaatttggaccaaaaggatttcaattacgtgaagaacatttgaaagttgctgaagaaaattgcgaagtatctggcgggagctatttaattacagaagatgtagacattgcgttaaaagacgcagatttcatttatacagatgtttggtatggcctatacgaagcggaactttccgaagaagagcgaatgaaaactttctatcctaaatatcaagtgaataaagaattgatcagtaaagcggctccacacgtgaagtttatgcactgtttacccgcaactcgtggggaagaggttactgacgaagtgcttgatgctccatactcagttgttattgatgaagctgaaaatcgtttaacagcgatgagagcactgcttgtatactttatgaatccgtatgtgaaagaagcgggttttgcagttgcggaaaaatatgatgctgaactagagttattacttagaaatggcgctggcttataagataccaaaataaggaggagaagagagcgctggccgttttcttccccccacttaaaaagaggagtgggcattttggaaaaaaagaagaaattcagattatttgatgcggttcttatggctgtatgtgtcgttttggttgtggaatctgccgcgccagcagcggcgataggatcatctcaatttttctggtggattgcgttacttattttatttttcttaccatatggacttgtttcggcagaacttgggacaacctatgatgatgaaggcggaatttatgattgggtaaaacgggcatttggccgaaaatggggtgcacgtgttgcttggttatactggattaattatccgatttggatggcgagtttagcggtattgtttgtagaagttattacgcaaattttcccggtttcatttgggacgccagtttcgattttgattcagctcatttttgtgtggattgttgttattgttagttgttatccagtgagcgatagtaaatggattcttaatatcgcggctttctgtaaagtcgcaattatgctttgccttggtgtacttgggatttattttgcgattacgaagggattggcgaatgacttttctggaaaagcattacttccaacttttgatttagagagtttatcatttatttcagtcattttattcaatttcttaggttttgaagtggtaacaacgcttgcgagtgacatggaaaatcctaaaaaacaaattcctcaagcaattatttatggtgggattttgatcgcattcttctatttactagcagctttcggaatgggggcagcaattccgacttctgaactttcaacgtcaggcggccttattgatagctttattatgctgattggcggagttaacccatttgttattattattgggattatgtttatgtatacattagtagcaaatttagtgtcttgggcactaggcgtgaattatgtagcaatgtatgcagcgaaaaacaaagatttaccagctgtttttggaaaaacaaatccgaaaaatgatatgccaacgggtactagtatattaaatgggattgtagcttctgtattaatcgttgcggcaccacttattccaaatgaaaatattttctgggcattctttgcattaaatgtagttgctttactaggttcatatatcctaatgtttccagcatttttgaaattacgtaagttggatccggaccgagaacgtccatttaaagtgccaggtggcaaaatcttgctttacttaatgactttcgtaccaatgattttactcatcattactttgattttctctgcagtaccattaaatggttcaagtgcagaattaaatgaaaaaatcccaatcttaattggaaccattgtagcggtgattgttggtgaaatatgtatttggcttgctggcaaaagaaaagacaaaggagagataaaaaatgagaacgattgatagttcttctaaaaaagatggatttagaatgcctggggaatttgaaaaacacgctggttgctatattatttggccagaacgaccagataattggcgcttaggggccaaacctgcgcaaaaagcttttgttgatgtggcaacagcgatttctcattttgaaccagttactgttgttgcaagttctagtcaatatgtaaatgcgagatatatgttgtctgatgaaattcgcgtagtggaaatggataacgacgatgcttgggtgcgcgattctgggccaacttttgttgttaatgattctggtgacgtacgtggagtggattggtcatttaactcttgggggggattggtcgatggtttgtacttcccgtgggataaagatgatcaagtcgctcaaaaaatatgcgaattagagcgaaaagatcgttatcgcttagctgattttgtgttagaaggaggttccattcatgtcgacggtgaaggcacgcttgtaacgacagaagaatgcttattatcagaaggtcgcaatccacaactttcaaaacagcaaatcgaaatggttttaaaagagtatttaaatttagaaaaaattatttggttaaaacgaggaatttatttagatgaaacgaatggtcatgtagataatattttcaattatgtacgcccaggtgtagtagcgcttgcgtggacagatgatgaaactgatccgcagtatgaaatttccaaagaatgctttgatattttatcgaatgaaaccgatgcaaaaggtcgcaaattagaagtgcataaaataaatgtaccaaaaccaattttaattaccgatgaagaaagtaaaggtgtagatgctgtggaaggaacgctaccaagggaagaaggcgaccgactcgcagcaagttatattaattactacacagccaatggtggagtgatttttccgctatttggggatccaaatgatgaacttgctcgcgaaaaattacaacaactttatccaaactgtgaagtggttggtgtaaaagcaagagaaattttacttggcggcggaaatattcactgtattactcaacaggtgccaagatgataaggagtgaacatcatgaatcaaaaaatagtcgtggcacttggtggaaatgcaattttatcgagtgatgccagtgctgaagcgcaacgaagtgctcttgaagaaacagccgaatatttggtgcaatttatcgaaaacggggatgatttaattatttcgcatggaaatggaccgcaagtaggcaacctgatgctacaacaacatgcgggagcttctgaaaagaatccagcaatgccgcttgatacgtgtgtcgcgatgacgcaagggagtattggctactggatgcaaaatgcgctagataaagcatttttaaaacacgggctagataaagtagcggtttcattaattacacaagttgttgtggataaagatgatcctgcttttgaaaaaccaaccaaaccaattgggcctttccttaataaagaagaggctgaaaaggaaatggcagaaactggtgcaatctttcttgaggatgctggccgaggttaccgtaaagttgtcccatctcctcgcccacttagtattaaagaacatcagattattaaacaattggttgatagtggcgttgtgactatttctgctggtggaggtggggtttcggtcgttgaaaatggccttgatttatctggggtagaaaccgtaatcgataaagattttgcttctgaaaaacttgcagaactaattgatgcagatttgttggttattttaacaggggtggaaaatgtttatatcaattataatcagccaaatcaaaagaaacttgaacaagtgaccgtttcagaattggaaaaatatattgatgagaaacagtttgcagcaggaagtatgttgcccaaaatcgaagcagcgacagcttttgtcaaagaaagaccacatgccaaagcaataatcacatcgcttgaaaatattggcgccatgctagaacgtggggcaggaacagtgattgttgcaggctagtaaaataggacggaaatccgggtaattgttactcggtttttgtcttgtaaaacagtatttcatgtataatgtgtttatgaagtaataggaggagaatgaggatgggacaactgaaagggttgccggtagaggacggattcagaatgccaggagaatacgaacctcatattggctgtttcatgatttggccggaaagacctgataactggcggcttggtgggaagccagcgcaacaaaactataaagaagttgcagtcgctatttcaaattttgagccagtcactatgtttgtatcaccaaatcaatataaaaatgctcgtaaagaacttccggataccattcgtgttatcgaaatgagtaatgatgatgcgtggatacgcgattatggacctagttttttggtggacgataagggagatatgcgcggcgttgactgggggtttaatgcttggggtggtcttcttgatggtctatattttccgtgggataaagataatcaaattgcaaaaaaagtttgtgagttagagcgaatcgactactattcacagaaagattttattttagaaggttgttccattcatgtagacggtgaagggacacttgttacgacagaagagtgccttttatcagaaggaaggaacccgaatttaaccaaaatagaaatcgaacaaactttaaaaaaatatttccatgcacaaaaagtaatctggcttaagcatggcttctatcttgacgaaacaaacggacatgtagataacatttttaactttgtggcacctggagaagttgttttatcgtggacggataacaaaagtgatccgcagtatgaaatttcaagagaatgttatgatattttagctaacaaaacagatgctaagggaagaacttttataatacataaactacattgtccagatccagtacttattacgcaaacagagagcgaaggtgtggaagcgattaatggaactttccctagacaggctggagatcgattagctgctagttatgtaaattactatacagcgaatggtgccattattttcccattgtttgatgatccaaaagataaagatgcgcaggaattacttgaaaagttatatcctgatagaaaaattgtggggattaaagcacgtgagattttgctaggcggcggaaatattcactgtatcacgcaacatctccctgataaaagtacgatacgtgaataagaaggagacttgaagtatggacttttacgaaatttccagtaagactgtagcttccctaactcgaaatgagcgaattttatttgactatgtcgttaagaatatgaatttaattaaaaatcaaagcattcgagaagtttctgcagaatgctttgtttcaacaacaacatttttgcgctttgtaagaaagcttggatttactggttatagcgagtttacaacggtcttaaagttcactttacttgggcatacagagctaaaaccgtccccatttgtcgtagaacagtcggattatcgtgaagaatatttaaaaaacattattgaatctgtccgagttttagaaccaagtaaaatcaagaaaatcaccaaaaaactagtaaacaaaccgcgaatttatttttttgctaaaggactgagcaaacatgctgcgaaatacatcaaatatctctatacaatgagcggatttttggtagagtttcctgaagattatcaatatcgccaagctgtattgccgcatattggtaaagatgatttagtttttatccttacgtacggtggacatgatattgaattaatccaaactgcccaaaaactaaaaagcagaaacgaaacgcctatgttgatttcgattaccggggctgataataacattattcaaaatatgagtgatattaatttatatatttttacagatgaaattgaaatgaacaatttagacatcacttctcgcatctctacaattgcaattatggagctaatcttataccagtttatggaagatgaaactagtagcttttaattgttaagaattgataaataagtcacaagtctgatacaaggagacttgacttgtggtaaaatgaactttgacttttaaataaaagaaaaggaagtgagtgcctggtggattttattacctatatcattgattttattttgcacattgaccaacatttagtggagattataaataattttggaatttggacttacatcattttattcctgattgtatttatagagactggattggtagtatttccatttttaccaggagattcattactattcgcagccggtgcattatctgtattagatggttcgattttacatattgttccgctaattattactttatggttagcagcagttctaggtgatacagtgaattatcatatcggtaaaaagattggaacatccataccagaagatagctggtttggaaaactaataaataaagaaaaaatggaaaaagcggaggctttcttcaataaacatggtgggaaaacaatttttattgctagattcatgccttttattcgtacgttcgcgccatttgtagctggagcaagccgtatgaattatcgctatttcttaaattataatattttaggagcaacagtctgggtattgctttgcacgcttgcaggatacttcttcggcaatttcccaattgttaaagacaacttctcgttagtagtaatcggaattattgtagtttccgttatcccaatggttgtttcatttattaaaagtaaaatggacaagaaaagcgcagaataatctctgtgcttttttttatttcccgggaaatctctcgcatacatgacaaacttttggggtaattagttaggaagaggtgatgaaaatggaacaagcattgaatattacatctgaaattggcaaactccaaacagttcttgtaaagaggccgggttctgaactcgaaaatatcacaccagaatacctagaatctttattatttgatgatataccgtatttaaaaatgatgcagaaggaacatgatttttttgctaaaacaatgagagattcaaacatcgaagtactctacttagaaaaactagccgctgaagcattgcgagaagctaacaataaagagtcctttttaacgaaaatgattaaagaatccaatcaaatggacgaaagtgcgctatatgtgcgagattatttgatgtcttttgacgaggaagaaatgattagaaaacttatgtctggtttgaaaaaatcggaaatccccgagcgtaaaaagaaacatttaaatgaaatgatggacgaacaatatccttttttcctagatccattaccaaatttgtatttcactcgagatccagcagctgttattggtaacggggtgacgattaatagaatgttccagccagctagaaggcgagagtcaatatttatcgagttgattttaaaacatcatcctcgttttagcaatcaagatatcccggtatggtcaggacgtggggagccgttttctttagaaggtggagatgagctagttctgaatgaagagaccgttcttgtaggtgtatctgaacgaactgatgcacgggcagttgaacggcttgcagaaagtttatttaaccgttctccaaaaattaaacgagttttagctgttgaaattcctgaaacaaggtcatttatgcatttggacacggttttcaccatggttaattttgcgcagttcacgattcatccagcaattcaaaatcaacaaggtgaactcaatatatatatattggaaaaaagtgagaatggattggaaataactccgcgaagagattttcagcgcgtgattgcggaggttttggatgagccagaaattgattttattccttgtggcggagaagatgtaattgtttcggcgcgagagcagtggaatgatggggcaaatacgttagcgattgctcctggagaagtaattacatatgatcgaaatcaagtatcaaacgatctgttaagaagtgcgggtattaaggttcatgaagtgattagttcagagctttctagaggccgcgggggaccaaggtgtatgacgatgccgcttgttagagaaaatctaaaataggctttgaaaaatgagaatcccctttcaaaatgcgactttcgctaaaagtattgttggcgattttaagatgtgctatagtgttttcaaaccagaattttcgagaaatatcttgctggttagtttgcgctatgatataatattttattgtgagtaattataaattattccttgctcgctcttgattttaaggcttgctaaaggcagtctggatttcagggatatggtatggtttcatgctatatcagagccgcttaagaccacaaggaggtgtagagtagatggctagaaagtacgaaattatgtacatcattcgcccaaacattgaagaagatgagaaaaaagctgttgtagaacgctttgacggaatcttaactgaaaatggtgcggagatcatcgaatcaaaagaatggggtaaacgtcgcttagcatacgaaatcaatgactatcgtgatggtttttaccacatcgtgaaattaaacgctgataaagcagattctatcaacgaatttgaccgtttagctaaaatttctgatgatatcattcgtcatatggtaattaaagaagaagcataagaatttattcaaggctaggaccttgatttactaaacgagaggaggttggttttgcatgatgaatcgtgtagtacttgtaggacgcttaacaaaagatcctgaattacgttacactccagctggtgtggctgttgcgacttttacattagctgtaaatcgcactttcactaaccaacaaggagaacgagaagctgactttattaattgtgttgtttggcgtaaaccggcagaaaacgttgctaatttcctgaagaagggaagcatggcgggcgttgatggccgtgttcaaactcgtaattacgagggaaacgacggtaaacgtgtttatgtgactgaaattgtagcagagagtgttcaattccttgaaccgcgtaattctaatggcggtggcggaaataactatcaaagtggcaataacaacaataattacaatagcggtggaaataacttcggacaagcacctacaaataacggtggattcggacaggaccagcaacaatctcaaaatcaaaattatcaatccactaataatgatccttttgcaagtgatggtaagccaatcgacatttctgatgacgatttgccattctaaattcattttagcggtttgaactttaagataggaggaactttcaatggctggaggacgcagaggcggacgccgtcggaaaaaagtatgttactttacttccaatggtattacgcatatcgactataaagatgtagaacttcttaaaaaattcgtttccgaacgtggtaaaattttacctcgtcgtgtaactggaacaagcgctaaatatcaacgtaaacttactgttgctatcaaacgctcacgccaaatggcattactaccatttgttgctgaagaaaaataaattaattttaacagtctagaattcatttctagactgttttttcataaaattagaccttagatcatgtaaacctaggacctaagaaggaagttaatgctatttattcatgttattcttatatagaagtaaaaaaatgcacagggggaaacaatcatgtataaaaaattagcaacagtagggatgacggtattattagtaggagctttatcagcatgtagttttaatgatgataaggatacatcatcaaataatagcaacaatgaaactactagtagcaaaagcagtaataatgaaagttcatcagatagcttgcaaaataaaagcttagatatgagctatgaagacgcgattaacgcattcaaagacaaacatagtgatgcagaaatatctagcgttgaattagagaaaagcttgggaaaatatgtctacaaagttgatgggatttcaaatgataatgaatacgaaatgaaattcaatgctgaaacaaaagaacaactaagtgatgaaacagatcgacttgaccgagaagatgcaggtggagttgaaaaagaaaacgaaaaacttagcttagatggaattaaatcaccaaaagaagccatggataaggctgtttctgaacaagctggtgacgtaacaagttggaaaatagaaagagaattagatacaacttattatgaagtgacagtaaaacaagataataacaaatacgaaatcaaactaaatgcaaaaactttagaaattcttcaaacagaacaagacgattaataaaatggaaaagccaactgtgaacattcttttgcagttggttttttttatgaataaactcacttaaataaaatattaatatgggtttttaagcctattatacagtcctttttacacgttcgaatattctgaaatgtatccaaaaaatcggcaattctgctcttttttggtcgttcatgacaagaatcggacatttcattacatttttggttattatgggtaaattcgttgtaaaatattagtggaggtgaattagttgagtaattttactgcaaaagtccctttgtcagaaagaatggcggatgtgttgatttcgaaagaccgctggaaagatgatgaagaaggttatttaaaagtaaaatatggactggaaataattctaattaatgtcatgaagtttgctctcgtatacggtatcgccttagtaacagggcttttactgcaaacagtgacagtgcatctgtcatatttatggctcagacggtattcttttggattacatgcaaccaaaacattgaattgcacgttaattagcttattgatgtttgtgcttgcgccatttgtttttcaaaatatcccctctaataattggattgttttaggtacatttggatttatactgctcaacatgtttttattcgctccggcagacacagaaagtttgcctttaatcggtgaagaacaccggaaaacactaaaaagaaaagcgatgatagggacgctaattttaacgggaattgcgttgctaataccattcgcagagatgaaaacattaatcatggtaggatctttgtttcaggtgataagtattaatccacttacttacaaactattgaaaaggaggtatcggaactatgaaaaatatgaataaatcagttggtaaattcctttctagaaaactagaagaacaatccatgaaagttgcggattcttctatgagtaaagcttgcttcatgtttgtatacgaaccaaaaagtccatttgtgaaaatgcaagaaaaaaacgaaaataaataaatttaaaactgtataacatcaaaattcatgctaaaataaaaagaaggcaaacttacatatttaaacatagatattttagacagtggaggattaatatgtttagtattttgatggcaattatacagataacgggtatttttattgcaatccagattttaacaaacaaagttttttcaattaaagagggattggttactatagcaattgctatgctagccttccctttatttactttagttcaatactggtcgatgatttttgtattgattgtttttgtaagtgccttatattggaaaaataaaaatgtagtagtttcagcttctattacgcttgtggttattattttacttactattagtgactctatagtaggttttattttagtaccgggcttgaactttaaatatgatgagatatttaatgaactgttaccaacgttaatttactgcgcgggaatgttggcgaatttgttggtattttcgtttcttcttagaaaattgattgaaaaagttaatatttctagatttgttgaacatagaaaatatgcgtatattattttttctatcgttgctcttactgtcttagcgttctatatgaacatatacgcggggtcaatcgcaggttttgatggatcagttttgaaaattaatacgcttatttttacaggatataccattttgttaatagttatagtgacggttgttattaatacggcaaccaacgaacttaaagtacagaatcagaaggaacagctagaacagttacaggattatgttactacattagagtccctgcatagagaaatgcgcgtttttcgtcatgattatgtgaatatcctgtcaacacttgttggatatattgataataatgatatgccgggtttgaagtattactttgaaaataatattgtacctataaataaaacaattgaatcgaacaactataagatttcattgcttcaaaatattcatgttattgaactaaagggcttgctagctgttaaattaatacgagctcaagagttgaaaattgatgcaattttggaagtagttgaaccgattgacaagatttcgatggatagtatagatttatgcaaagttgtcggtattttgctagataatgcggttgaagcggcgttaacttgtgaaaatccagttattcgaatcgcgtttgtgaaaaaaggtgatagcataattattgtatttgcgaatagtttaccagtaaatatgccaccgatttataagatatttgaagaaggtttctctacaaaaggagaaggtcgtggattaggccttgctagtttgcgggaaattatgaagaaatattcgcacgttgccttagatacgaaagtgaccgatagagaagttattcaagaattagaaattatgtagaagaatggggatgaatttatgctaccggtttttatttgtgaagataacagaatgcagcgagaaaggttaacgaaatatattgaagactatattatggttgaacattttgatatgaagttagaactttcaacaggagatccgtttgagttagtatcacgaatgcctacacatcaaggtatggggctttattttttagacattgatttggggcagccggacatgaatggttttgaattagctcaggaaattcggaagtttgatccgcgtggtttcattatttttattacaacacatgcggagttaagttatatgactttcacgtataaggtggaagcgcttgattacattattaaagacgatattgatttgctgcatgaccgggtacttgcctgtatgaagcaagcagaagaacggatttccaatgatcaagatatgcagaagtattttacgtttaaagtgtcggataagaagattattcatgaactgttagacgatatcttgttttttgagacagcgccaactattcataaagtaattttacatggcaaaaatcgccaagtggaattttatggtaagttgaagaatatcgagaaaatgttggacgaatcattttatcggtgccacaggtcgtatattgtgaataagaaaaatattcatgagctagatacgacaaaaggtgtggtgaagatgtctaacggtgaaaattgttatgcatcatcgaaattaattaaaagcttgagtttataaaagtggccttaaaggtcgctttttttgtacaatggcaagtttggatttgatgaaatgggtaaatataggtaaaataatagtgatgaattgttagttaagtttatgttatgatatagatactcaaattcaggcaaaaggtatgtaaaaaaatggggagctggatgaaatgtcaggctattttcaaaaacgaatgcttaaatatccattatacggtctgattgcagcgacaattattttgagcgtaatcacgttctttttttcgtggtggttatcggcgttagttgttgttggcggaattattcttacggttgcgatgttttattttgaatatcgcttgaatgaagatgtgcaactatatgtttctaatttaacgtatcggattaagcgtagtgaagaagaagcgcttgttgaaatgccgatgggaatactgctgtatgatgaacattacaaaatcgaatgggttaacccgtttatgtcaaaatactttgataaggcagagttaatcggggaatctttggaagaagtaggaccggaatttttggacgttattactgggaatgatgaaaaggggattatgtcgattgcttggcgtgatcaccgttttgatacgatagtaaagcgtaaggaacgaattttatatttatatgatcgcacagaatattatgatttaaacaagaaatttcaagcgaataaatctgtatttgcggttattttcttagataattatgatgaatgggcgcagggcatggatgatagacgtcgcagtgctttaaataatttggtgacgtcgatgttgaccaactgggccagggaacatcgtatttatttgaaacggatttcgacagaccgatttatggcctttttgacggaggaaatgttgaagcggttggaggaagagaagtttcaaatattggaccggattcgcgaacggacgtcgaagcaaaatattccattaacgcttagtattgggattggttataaggaagatgatctgattcagttggcggatttggcgcagtcgagtttggaccttgctttagggcgcggcggagatcaggtcgtaattaagcaacctgaaggaaaagtgcgtttttacggcggcaaaacaaacccgatggaaaaacggactcgggttcgcgcgcgtgtgatctcgcaagccttgcaagagttgattacgcaaagtgaccaagtttttgttatggggcaccgctatccggatatggacgtaattggttcgagtcttggagtgatgcggattgctgagatgaatgatcggaatgcttatgtggttgtggaacctggcaaaatgagtccagatgtgaagcgactaatgaatgaaattgaagaatatccgaatgtaattaaaaatattgttacaccgcaagtcgcactggaaaatatcacggagaagagtttgctcgttgttgttgatacacacaaaccttcgatggttattaataaggaattgctggactcagctacgaatgtggttgttgtcgatcatcaccgtcgttcagaggaatttgttgggagtccggttcttgtttatatcgagccatatgcgtcatctactgccgaattgattacggagctatttgagtatcaaccggatttagagcaggttgggaaaatcgaggcaacggcgcttctttccgggattgtggttgatacgaagaactttacgctgcggactgggtcgcgaacgtttgatgcggcaagttatttacggtcgcttggtgcggacacgattttggtgcagcaatttttgaaagaagatattactacttttacacagcggagtcgtttagtggagtcgcttgaaatttatcatgatggtatggcgattgcgactggacatgaggacgaggaatttggcacagttatagctgcgcaggcggcagatacgatgctttcgatggaaggcgtgcaggcatcctttgttattacgctacgtccggataaattaatcgggattagcgcgagatcgcttggccaaatcaatgtgcaagtcattatggaaaaactaggcggtggcggacatttatcgaatgcagccacacagcttaaagatgttacaattgcagaagcagaaaaacaattaattagcgccattgatgcgtattggaagggagaaacataattatgaaagttattttcttgaaagacgtaaaaggtaaaggtaaaaaaggtgaaactaaaaatgttgctgatggttatgcaaacaattttttaattaaaaatggttacgcagttgaggctaacaatgcggctttaagcactctttcagcgcaaaagaaaaaagaagataaattagctgctgaagaactagctgaagcaaaagctttgaaagaaaaaatggaaaatttaacagtggaattaaaagcgaagtctggtgaaggcggcagattgtttggttctattacatctaaacaaattgctcaaacgcttgaaaaaacacatggtattaaaatagacaaacgtaaaatggacttaccagaagcgattcgagctttaggacatacgaaggtgccggtgaagttgcaccatgaagtaacggcaacacttgatgtacatgttagtgaagaataatttttcttaagggagcgtaagacagtggataataatttccaggacagaacaccaccacaaaatattgaagccgaacaagctgtactgggcgcgatatttcttgagccgaatgcgctgattaccgcttctgaaattttaatgccggatgatttttatcgtactggtcaccaaatcatttttgaaacgatgcttgatttgaatgaccacgggaaagctgtcgatgtattaacggtttatgaggcgcttgctgccaaaggtaatttggaagatgcgggtggtttgccatatttgacggaattatccggggctgtgccaactgctgctaacttagaatactatgcgcatattatcgaggataaggcgcttctgagacgtttaattagaacggctacccaaattgcgacagatggttattcgcgcgaggacgagctcgacatgcttatggacgaggcggaaaagagtatcttggaagtttcgcaacgcaaaaatgttggggcgttcaagaatattaaagatgtccttgttaaaacttatgacgatattgaaattttgcataatcgcaaaggtgatattactgggattccaactggatttaacgaacttgataaaatgacagctggatttcagcggaatgatttaattattgttgctgcgcgtccttctgttggtaaaacagccttcgctttaaatattgcgcaaaatgttgcgacgaaaactgacgagaatgtggccatttttagtttggaaatgggtgcggaacagcttgttatgcgtatgctttgtgcagaaggtaatattaatgcgcagaatttacggacgggtgctttaacgagcgatgattggcaaaagctgacaatcgcgatgggtacactttctaattctgggatttatattgatgatacgccgggtgttcgtgtgaatgagattcgttccaaatgtcgtcgtttaaaacaagaaactggtcttggcatgatcgtgatcgattacttgcaacttattgcggggagcggtcgtggtggcgaaaatagacaacaagaggtttctgaaatttctcggtcgttaaaagctttggcgcgggaacttgaagtaccggttattgccctttcacagttatctcgtagtgtggagcaacgccaagataaacgcccaatgatgtcagatattcgtgaatcgggttcgattgagcaagatgcggatatcgtcgcctttttataccgggaagattactatgaccgagaaggtgagaatgacggcacgattgagattattattgcgaaacaacgtaatggtccagttggtgacgtgaaactagcctttgtaaaagaatacaataagtttgtgaatttagaagtgcgttacgacgacgcaatggcttaataaggaaaccttgtgaatttctaattgaatttggagtttgcaaggtttttattttatgcaaaaaggtaacgcattactattaatagactttgaaattcccttaaaaggattaaaaaagcgaacgataaaattaccttacaaatcaatgttcgtaaatccattgactattttggtggcaaacggtacaatgtatagtggaaaatgaagaggctatgaaaaacgcatagctatcaaagaccaattaaatgaggtgtttaaatgtcttcagttgttgtagtaggaacacagtggggcgatgaaggaaaagggaagattacggattttctttccgagaatgcagaagcgattgctagatatcaaggtgggaacaatgcaggtcatacaattaagtttgatggcgtaacgtacaaattacacttaattccatcaggtatcttttacaaagaaaaaattagtgttattggtaacggtatggttgttgatccaaaggctttagtggaggaattaaaatatcttcatgataaaggtgtggatacttctaatttgcgtatttctaaccgtgcgcacattattttaccatatcacattcgtattgatgaagctgacgaagaacgtaagggcgcaaacaaaatcggtacaacgaaaaaaggtatcggcccagcttacatggataaagcagcgcgtgtaggcattcgtattattgatttattagataaagaaacatttaaagagaaattagagcataatcttggcgagaaaaaccgtttattagaacgtttttacgaacttgaaggctttaaactagaagatattttagacgagtactatgaatatggtcaacaatttaaagaatatgtttgcgatacatcggttgttttaaatgacgctttagatgatggtaaacgtgtgttatttgaaggtgcgcaaggggttatgcttgatattgatcaaggaacatatccatttgtaacttcaagtaacccgattgctggtggcgtaactatcggtagtggtgttggtccttcaaaaatcaatcatgttgttggtgtggcgaaagcttatacaacacgtgttggtgatggtcctttcccaacagaattatttgattctattggtgacactattcgtgaagtcggtcatgaatatggtacaacgactggtcgtccgcgtcgtgtaggttggtttgatagcgtagtggttcgtcatgcgcgtcgtgttagtggattaacagatttatcgttaacactacttgatgttttgacaggaattgagacacttaaaatctgtgtagcttacaaattagacggaaaaacaattacagagttcccagcaagtttgaaagatttagctcgttgcgaacctgtttatgaagaacttccaggctggacggaagatattactggagttacatcactagatgatcttccagtgaactgccgccattacatggagcgtatcgcccaacttacgggtgtgcaagtttctatgttctctgtaggccctgaccgcgctcaaacacatgttattaaaagcgtttggcgtttagcttaataaaataattatcaagcccatctaaggtgtattcttggatgggctttttttatatggcattctcgctatataaaaataaaagtgattttggaatggtatacaattttttgtttcaaaagttgaaaaagttaacaaaagaaaatgaagtttgtgaaaaacacatctttttatatagaaatgttgttatggaaagaccaattatcaaggctttgtagatattttattcgtatttttgtcacatttcgatttgtgaattcgtgttataatttatgagtgatatcttattcacaatagataataagaggagatgaagtgaatgtcaggtcaaattcgtatgagtccaagcgaactacgtgatcgcgcgaaaacttacggtcaaagtggtcgagatattgaggatattctaagtcgtttaagtcaactacaagaacaactacgtagcgaatgggaaggtcaagcttttatgcgttttgatgatcaatttgaacaattaaaaccaaaagtaactgaattcgcaaacttaatggatcaaattaacgatcaacttgagaagacagcaaacgcagtagaagagcacgatcaacaactttctcaaaacttcggattctaaaatcaacaaaaagtggggcatacatacaaatatcgttggatgctttacgaaaagccatgcagttttttgcatggctttttctaaacatagaaagcttatgcctaaaaaggtatttatataaaaaagacacagcgggagtgggacatgaatgaagaaagtaaaatggagtattttactctttttagtcttggcgatttttctttcggcaggaattacttatttggctttgaatcaaagttcgaataaagagtctaaaaataatagtgaaaaaacacacaagatgaccatcgcactcgttaatgaggaccaaggagacaacttccaaggaaaacaagtagagtttggtaatcaatttgttaaaagtattgaaaaagatgatacgcatgaatggtacgttgttagccgcggagttgcagaaagtggcttaaaacgagatgtatacaatatgatgatcgttatcccgagtgacttttctgaaaaagcaatgtcaatgacttcgagcgccccagaaaaagtgacaattagctacaaagttaacgatgtaggaaatagcgatctaaaagcggaagccgaaaaaacagcagcttctgtattggaagatttcaattcacggattattgatgtttattttgcaagcattttaacaactttacaagaagcgcaggataatattggaaccctagttaaagaagagaaaaagtatgacgctatctacaataaagacgtaaataatccgttatccagctacacaaaacagtttaaaacggtgcaagactacacaggaacttctaaagagagcttccaaggtttccaagatattatgaaagaatttgaggaaagcctaaatctctctcaaaaagaaaacgaagaacatatgaaaaacatggatgcttatacaaaaacacaagaggaaaatgctccttttggggcagaattcacagaaaacttgtcaaaatttgatggcactttatcggcagaagatattcgaatgcaaactgccgctttagaacaagtcaatgcgaaaatgacttcagaatttcaaattttagaaaatagtaattcattgttatcacaaacacaggctttacagagctatatagctgaaaccaatgcacggattgatgcggtggatgccgaaattatgggaacgctcgaaaatgattttcggacggctgtttataatgacttgttgcgtattttacaagaaaacgagtactcggataagttgaatgaaattggtcttaaagatttgaccggagaagatattaatgctggctttaacaaaatgattgttaaggaaatacaatcattaccaacatataatgcggaccaattagcatcgattgggcttgatgaagagatgtacaaaaatgttgtaacgctttctaaggaatattatagtaaccatcgcggtgcttttagcgaaggttttagctttacgactgatcctaaaactctaccaactgacacgctgaaaagcgatacgattaatcgattgaaatccgaaggggtcgcgctagaaagcagttcctatacggttgaaggtagcgattatccaacagaaataattctaactttagatgaaaatttcactttttcagatgttgattgtttggttaatggaagcagtaatccagagttagttcaacaaaacgcatacggagaaaatggcataaagcttagcatacaggcgcttggaagtacaccggcagagattaaaatcaccggaaaagcgaagttgcgagaaggtgtgaatgttccattaattggtgctgtaaattggaatgctacattgcaacaatatgagaaaaaagaatatagtgaaatgccaacaattccatcagagcttgatcctactaccccggatacttcattaatagttagaaaagaacctgtaccgattaaggtcactgcaccaacatatttgaatgagacgaagagttctgtaaaagcaattactaatacagtaaaagattactataaactacaagcattatttgatttatattacggaattgatgcgagtgattctggacaaataccggattttagtaattatcaagtgacgctagaaaattctgcgaaagcatcctcgtattattatatttttaataaagaagatgtgattggtagctttgtaaatcttactacagatcggtttgtggcagattatacgaaaaaaattaaagcttttgagaagcgaattgatgactacaaaaatacaatggctgaggccaattccagatcagaagacgtaacaaatagattaaacgaaacgacgcaagaagccattaatttaaatacaaatctagcgttaacgttgcaaaacctagaatcttggcgagaggaaagtaaaggtttaatagaagaaaatggcgttgttttagaaaaatctggcgaagaagccacgatggcactgcaattaagctctgaatttgccgggcttttagcggaaagtgaatcgttagctggtacttctgaaggtaatttgaagtcagcggaagtcgtgtacaaaacttttgatgcgatcgataaggaagccaagaatattcaacaaagcggagaaactttagtaaaagaagcctccacactatccgatgatttaagcgaaaaattggaagacgacgaaacgttccagaaaaatttcgctaaggttatggaaaatagccgtgttggtgatcgacaaaatgaaaatttatatagtttcttaagtagtccggtcgataagatgaatgccgggactattgttgcgggtgacaaatcaatgccatacttcatgattttgatttgtacgattctggcaattttcactagctacgttatttcacaccaagagaaaaaacgtgaacaattaaatgaatttgagaaagaaatgtcgcttgtctttaaaaatattccaattactttcctagcgatctgtgttgggattattgaggggctcataataggcgccatttcaggatttatttttgaagttggagaaattgggatgttcctatggataggtgtctgcgttctaattatgatgacgttagttactgctttttcatatttattacgtcagttcaacatgattgggatgtcgattattttactcgttttaagtttgtatctattcttaacggatgcagttggacttaacattgataatgaatctattttcgcgacgttcagaacgttctcgccacttcaatacatggaatacttattgaatgggattttgagtgcacagaaggattatattattgtcgtatacagcttgattggcgcgacagtagtatttactggtctcaacctatttgtctggcaccgttctaaagaaaaagtagaggaggacgattcagatgaaatataaaatagtagcactacttatgttactttgttttgcttttgctccgggagttctcgctgcggattcagatagctatttagaaaacaatgggaaaatggacatcaaaacagatagacttcaaaaaacagaagaagaaaaaacaaaagaactagaacagatggaggaaacagagctcgataagaacggaattccactttttactgacgaaatggatgaaaaaattgccaaagaaaaagcggcagagaaagcggaatatgaccggattaaagactcactttttgaagaagaatctacatctggcgaaacagtaaaaaaaacgaaagagaagttgtttacaggcgagtacgagacaacagctgtaaacacggaaacacctactactacggaaacaacagtagaagacgaaacgaaaaaaacaaaacaaaaaacagttggtggagcaattgcagggacacttgtagctttagcaggcgggatttatgtggctgcgcgcaatgtttttgaatagaaagcggggagttttaattggctaaaaacacacatatgaatgtgacagttgatttcactaattggggagcaagtaagtatgatttgcgaattccggtgcatcaaccaatcaaagcattaattatcaatttggcagaaacgctcaaaatcgattacaaagatttgtccaaatgtacgataaaaacaacgaataaagcgatattactaagcgatgatgacaaattgactaattttcaaattgcggacggagacattttagaaattttatagaaaaaaaggagaataaaaacgatgaataagacaatagaaatggacggaacaacttacgattttacttatgaggatctagtttggagcattacgtttccaaaatcaaaaacacgcgctaaagaactcgcacaactagaactattagaaaaacctgcgacacattttactcctgcgaaaatttcgagtgatagcgattcatatacgatttcttatgagattgcgccacgtacttatggatttgaacaagttcgaaaaatgggacgtgaagataaactgcgcgcactgcggaatattgcggatttaggcgaattgttaaacacgcgctatacattctttttacacccggataatctgattttcgatattaacctagtgccaagtattgttcatcggggcattaaaaatatattaccgccttatgaactaacagaagaaacttttttcaaacaatatcaatgtttcgttattgcgatgttttctaagaaattctcttttgaaaacttgtacaatggctcgctatcaggggctagaggaacgcaatttgagaagagtatattagatgcaaaaacggtgcaagatattgctactattttagaagaagcatacatgaaagaacatgcggcggttcaaaaaaatatggcaagcgtaccgaagaaaaaatacagtactttccgtgggttagcggttggtttcattatcgtcgctattttacttgcaattccagtaagttattttgcattcgttaaagtccctttacaaaatgatttattaacagcaaacgagaatttcctgaagacagattacgataaagtgattacaggtctagaaaatgtggatccagaaaaaatgccgcagtctgtccaatatgaattagcttattcctatgttaaaggcgaaaaaatgagcgataaaaagaaagaaaacattatgaatacaatcagcttaaaatctgacgccaaaaacttactttactggatttacaatggtcgcggagaatttagtaaatcacttgatattgccaaacttttagacgacccaacgcttgcgatgtacagtttaacaaaacaaattgaacaggtacaaagtgatacaacattaagcggcgatgaaaaagtggaaaaactaaaaactttggaagaaagcttgaaagaatacgatgaaaaagtaaatgagtcaactacaactgaagatgaaacaacaaatacagaagcaaaataagggagaatggaccatgaatagagaggctttattaattgttagtaacgggcagcaatgtcataaaaaccacttgtctcctgaaaaagtcgtgacaattgggaatacaatcgaacacgaaatcacttatcctgaactggctgagtcgattgaagttaaatacgatgaaggctcttggaatgctggaacaacagcgctccaggcgaatcaagctgtaaatgtagagaacttagcattctatctatgccaagatttacatacgcaagtttatgatgttgtaacgaatatttctgtgacatttggcgttggaatagaaaatgatgtcacattagatgacacaaaatcagattttatacttttacgtgatgcaaaggaaaaactgtttaagttacaagtcttaaatggcgaagtttatcataacttttctctagtgacggaagactgcgttctagaaccgggcgatcagctctatacagacggtgtgacgattacaatcggaaaagaagatattagtgtgctagctgtgaaaaatcgcgtgacgagcaaattagcgcctttatttgctgcggacaattcattcggggaagattatccggattaccaccgttcaccgcggattatttaccgtgcgccagaagaaaaaatcagcatggcgaaaccgtcaagtaaaccctctaaaccaacagatggtttaattaaaatcattctaccaccactaatcatggtagcaattacggtcatgatttcgattttccaaccacgtggactttatattattatgacaatcgcaatgtcagcagtgacaatcacaatggcgattcttaactacataaaatcacgtaaaaaatacaaaatcgattccaaacaacgcgtggaaagctacgatttgtatttaaaacgaaaaacgaaagaattgcacgaaacaagcgaaaaacagcgtcacgctttaacatatcactatccagacgtaactgaactagaaaaaatggcgctacgtgtggattcgcgtatttacgaaaaaacaatgttccatcatgatttcttgactttccgagttggtcgcggcgacgaaacaagtagcttttccgtggaattccaacaggaagagttcagccaagaaaaagacgaacttgtagaagaagctgtgaaaattaaagggcagtatttatcaatcaatgaagtgccagttgcaacagatttaatgcacggaccagtggggtatatcgggccgcgccgtttagttctagaacaactgcaaatgttagtaatgcaaacatcccttttccatagttattatgatttgcaatttattacgattttcccagaagaagaaaaggcggattgggactggatgcgctggttaccgcatgcgaatatgcgtgatgtgaatgtgcgtggttttgtttaccatgaacgttcgcgcgaccaagtattgaattctctttatcaaattttaaaagaacgtaaacaagcgctcactgaacaagcgagcaaacaggaaaaattatactttacgccacattatgtggttttaattaccgacgaaaaattagtactcgatcacacggttatggaattcttcaatgaagatccaagcgaactaggtgtttctttagtgttcgtacaggacgtaatggagagcttgccagaacacgtgaaaacggtcgtggatattcgtgatgcgaagagcgggaacattattttggaacaaggcgaccttgtaaacagagcattcgtgccggatcatttgccagcagattttgacaaagaagtaatcagccgggctcttgcaccgctaaaccatcttcaaaacttgaagaactcgatcccagaatccgttactttccttgaaatgtacggtgtagaacgcgtcgaggagctaaacattgctggacgctgggcaaaaaatgaaacgtataagagccttgctgtgccacttggcttgcgcgggaaagacgatatcgttcaactgaatttacatgaaaaagcacacgggccgcatggtttggtagccggaacaactggttctggtaaatcagaaatcattcagtcttacattatttcacttggcgtcaatttccacccatatgaagtcgcgttcttgctgattgactataagggcggaggtatggcgaacttatttaaaaatatgccacatttactgggaacaattacaaacttggacggcgcgcaatccatgcgtgcactagcttccatcaaagctgaattgcagaaaaggcaacggttatttggcgagcacgatgtcaaccacatcaaccaataccaaaaactatacaaacaaggaaaagcgaccgaaccaatgccgcatttattccttatttcagatgagttcgccgagttgaaatcagaacaaccagaattcatgaaagaactcgtttcgacagcacgtatcggtcgttccctaggtatccatttaatcctagcaacccaaaaaccaagcggcgtcgtggatgaccaaatctggtccaactccaaattcaaactggccctaaaagtacaaaacgccagcgattcaaacgaaattttgaaaacaccagacgcagcagaaatcacactaccaggtcgttcgtacttgcaagttggtaataatgagatttacgaattgttccaaagtgcttggagtggcgcggattatgtgcctgataaggaaagcacggattatattgatacgaccatttatgcgattaatgacttgggtcagtatgatattttgacggaggatttgagtgggttagataagaaggatgatttgactaagttgccgagtgaattggatgcggttattgatcatattcacgaatatacagaggcttctgggattgaggcgttgccgagaccttggttgccacctctggaggaacaaattttcttaccagaattgcaccaagtaattactgacgagctgtggagcggtgagaaacaacctcttcaagcaacaattggctttttagatataccacaaatgcaagcgcaagagccattaacaattgatttggcaaaagatgggcatttagctgtgttttctagtccgggttacggtaaatcgactttcttacaaacaataacaatggacttagcaagacagcataaccctgaaagattgcatatttatttactagatttaggaacaaatgggctactgcctttgaaaaaattaccgcatgttgctgatacgattatggtagatgaggaaattaaaatcggaaaacttattcgtcgcttaacactagaattaaaagaacgtaagcaaaaactgagtaaatatggtgttgcgagtatttcaatgtatgaaaaagcaagtaaggaagaagtcccagcaattttactcgttatagatgcatttgattctgttggagaagccccgtataaagatgtatttgaaaaactaattgctcaaattgctcgtgaaggagcgagtgtagggattcatttagttatgagtgcagttagacaaaatgctattcgcgtacaaatgttagcaagtataaaacatcaaataccgttatttatgattgaaccaggtgaatcaagaagtattgtaggaaaaaccgatttaaccattgaagaacttccgggccgtggattagttaaattagaagagccgactgttttccaaacagcactgccagtttgcgcggatggaacacttgaaattattgaaaaaatccaagcggaaagtgaagcgatgtctagcgagtggaacggatcacgacctgcgccaattccaatggtacctgaagtaatcaatatgcttgaatatctagaaaataaacaagtccaaaaatcactttcagaaggaaaaacgccaatagcagtagattttgaagatgtattaccagtcaatttagatgtgcaaacagatggcaacacacttgttttaacagataatgcagatgttttggaaagaaccatggtttcgctaactgaactaattggtcagaatatggaagtggatattgctctatatgacaattcgtctaacagattccaacagtacagaaacaacgtaaatatatacgcaggtgaggaaactgccatgaatagtacttcagagcaaattgttagcgtactcgaagctcgagaagatggttggaaggagattcaacgggcatcgaatggagaaatcacactcaaaatgtatgttgaagaattacgaccaatgtatgtactactaacggatagtatctatgctgcggaacagatgtctctggaagctaggaaaaatatggtccgactaattgaaaatggacctaaattaggtatctactttgttaccggaagccaaacaggaattctatatagagctcgagatgaaatttctggtgaattacgaaaacaaaaaaccggtatcttacttggacggatttcagatcaaaatattctcagtctcataaacaacatctataaagaagctctgctagcgccgtatgaagcgtattacattaaacaaggtcaatacgaaaaaattaaacttattgcaccaaatcaataattgaaaggagctgttaatgatgggtctaacagatttctggaaaacacctactgagaaaaaacgagatgaatacgataagctgcatgactatctaaaagatgctctcaaaaaacatgatgaaaaaatggcagaagtaaaaagtgatttgagtgcgtataaaaaagggatgcctgatatgccgagcaaaggtattcctgcaaatccatttgtagaaaaaaatgagaaagtcttagagcagcttgaaaaatatatagataaagaaaaagataaacgtgccagtttgaaaagtgccattgatacagcttatagaaaatatttagagtataaagcattggccataaaagaagaaaaagcagagcaagcaaagaaagagaaggagaaaaaagaacgagaggagaggctaaagaatgggtaatgtgaaaattgatgccgcaaaagttgctgaagctaaaaaatcggctgccatagtggaaaaaagcttagaatcaacacataaaaaatgcaaatcagtcatttcttatgtagaaggcgcatcttggagtggtaaatcgcgggacgctttccttaccttcatggaattaattgaaaagtatcatgccgatgtgaagaaaaactataaaaagcaaaagaaagcattaactgccttagaagattatgtagaggattttgagaatacttcatactccaaggatgtgaaaagactatgacagtggaaacgatagacgtattttcacctgttgagttataccttttactttctccaatcgaggcgcaacacttatttggtgttcctgacaagcttacttttttattaaagggagaagatgtttttgctgaaggatttgaccggcttaagagtaaagggattttaaatgaagcgggggagctaacggatggcggcggctttttgattgattccttaattgaatattatcaaagtaaaaagtatgtgcgtatgaaccagctgatgtttgcttttctagaaaaaacacccaatgaactacttgtaatgattgagataacccctcaaaaagaatatcgatttgaacgaatgaataaaatttatgcgctagaaatgataaaagatttctttccgctcattcgtagagaacctggtgaaagagagactgagtttctaaaagaagaattgactaatgaagagcgtaaacgagcaactgcttttgatccggagaaaaattttattagtatggaattctttcatgtggatgaggaaccaaaagaaaaaaacaatgctaaatactacaaacagtacttggcatttgagatggaagacaaattaatgatggtagatgttgtaaacgatacctattaccgtggaagccagtatgctttattaaaattattgtttgatgaacttgaatttccttatgaggaggctaaatagatggcacaacaaacgatgggcggtgcaggagccgcttctacaatagatattaatccggatgaaatgactcatattgccaaggaattactagcaattgctaatgagtttgaaggagtaataaagccagcagtaaatcagttaaaagcaaataagtatttaacaaaaggcaaagcaaaaaaagcaatggataaagtacctaaagcgaatgaacgtgtaatggaacttcaagaccaatacaatatggcgtcctctgttgtgtttgatatactccaaaccatggttgatgcagacagagatattgctgaaaaaattatcgcagctttagaggtataaggaggccagatgaatgaaagaagtcaactaccgagaagacgactggcgtgaagccaaaagtgccctcgctccatttgccgcagcgaattgggtaggcggtttattcaataatttagaaaaagtatcgaaaaatatggaagaagcggaagaagatgtccaagagttggactcagaccacgcgatttcgtttcaacacaccaactatcgcgggaagtacagcgctatcgaagacgatttgatggtattgtataagtttagttgtcatgcaggggaaaagatggaaaccctggtagaccaaccgttctatgagaagttagacgcgtttgtggatggcatgcaagatttgagtatttcgacgtattctaccaccaaccggattggtgcgaagtcgaaacaaacctatacaactacatctggcggttcgcaagtcatcgagtccatcaaagaaggtgcgacgatcgaagatttgatgaatggcgataacttctacgcaaaccaaatgcaactacaatacagggactggcaacgagcgaatccagatcaagatgtgagtaagaaagactttcaaatgggaatgttacatagtcgggcatttgaatataaatcaattaaagatgaacaacaagagaaagaattttgggtcaacattgtggcaaccgtggtgattgtgggagtcagtattttctgcccacccgccggccttgccttagccgtaggatacgggagtttagaagctggttcggcaatcagtgggaaggactgggtatctggccgtgaactaagtacagaagaacgagcgcttcgtggcggtttagcactgctagatatcgttccaggtgtgaaagcattgagcacaggagcgaaagctgccagtgccggctcgaaacttgtccgcgtaggcgataatgttttagcaggtagcaagaacgtcggcaaaggaaccatcgacaatggcattcaagcaggaaaacaagcgatggatctccggttagccaatgcgaaaaaagtcagcgaagctgtccaaaagaaactcaccaaagaccttgacgatatcggcacgatggccaaaaccatccaaaacaaaaccaaagaaaccttcacacttccaccgagagagcaactcgcctttgcgagaggaggcagtattccggaacaaagcgccaccggagccgccgcgatagccgcgaagaaaaagctgaaagatattatgcagaacatggataatttgaatgtgaagggcggcgggaaagatgatataattgaacaaaataaaagccttaagtttacttcattagaggaatccgagaaatggggaattgatggtttttcagtatggagaaactctttatcttctcgtgaaatccaagctattagggactatacagacatttggcattatggaaatatgaatggttatttaagaggaagtgtcgaaaaacttgccccagataatgcagaaagaattaagaatctaagcagtgctttggaaaaagcagagttacctgataatataattttatatagaggaactagttctgaaatattggataactttcttgatttaaagaatttaaattaccaaaatttagttgggaaaacaattgaagaaaaaggatttatgagtacaactaccataagtaatcaaacgttctcaggaaacgttacaatgaaaatcaacgctcctaaaggtagcaaaggtgcatatctagctcattttagtgaaacacctgaagaagcagaggtattgtttaatatagggcaaaaaatgttaataaaagaagttacggaacttaacggcaagatagaaattatagttgacttattataacgaaggagtgaagaggatgcgaggacaagaagaaatagataaagaacaataccaagttctctttattaaagaaagactaattccttgtgttttaggcgcagtaattggagattgcttaggtgtcccagtggaatttaaagacagagaatacttaaaacaaaatccgattgttgaaatgataggatatggaacatacaatcaacctaagggaacgtggtcagatgatagttccttaacgtttgcattaatggaaagtctaatttctgggtatgatattaaccgcattgtaaataacatggttagttttatggatgatggtttttggacgccgtatggagaagtttttgatattggaagtgtaacgcgagaatctttaaatagatataaaaatggtgtatctgtgtttgagtgcgggggaaaagacaattttgataatggaaatggcgctattatgcgtattatgccattggttttttatctgggtaaagatttttcgttcggtaaaaaaaataaaattactgaggaagtaactagaattacccatgcacacccaagatctatactgggcagttatgtatatattgaattgcttcaaaatttgtttgctaacatggataagaagttggcatatgaagaaatgcaaaattatatcaggaaaaattatagtgattatccttttaaagacgaattacaatactataacaatattttagaagggaatttatatgaattgaaagaatccaatattaaatctagtggatatgtagtggatactttagaagcatctatttgggcatttttaaccacgaattcatataaggaagctgttttaaaagcagtgaacctaggcggagatacagatacaatagcttttattacagggagcctagcaggtatctactataaaatggaacaaattcctgttaattggattgaccaaatcgctaaaaaagaagatatcttaaacttatgcaatcgttttattgaatccttgataaagcaatgattgatcaccgtattcttttgtttttgatgtaaatttggttgtggcttgagcgggctgaattaactagggaaaccattgaataaaaaacaaatcttttgaaggacgtaaaataaatgatagatgagttaaaaaaatataaaaagataattgaagacgcagtggatttgttaggatatactccattaagatatgccatttttgaaggggaaaagaataataggattgagtatcaagtaaggattgaatatatagaaaaccactatgaagtctatacaacgggagagcgcgcttccatttctgggaaaaaacaatttgaaaacttttttgaagcgtatcataattttttgtttaaattacaacttagtattttgcagaatcgacgaagagtgagagatggcgaaccaccagaatatttttgtgcattatgggagaaatgaaatcaaggaacaaatagcatagcaattgctacaccaacaagtgatattggcaataactatgggactaacaactttaaaggtagtattttagcgtataaccagtgaaatattagtaaaacaaagagaataaaagaggtgaaattagctagatttaattggtatagcaatgacagttacatctaatataaatagtgaattagcagatggttttcaaggatatacagatgtaaggaagattacagtgaattcaacagttgatgtgggtgtttcaggaagtttaacagcagtacttggacaagtaggtagttcttttgggcttccaggtgcaataggtggactaggagttggactagtgttggatacgattctgagcttaaacggtacaaaagatacttggaaaaatagtattaacgaaaaaatgcaagatttggaagattggtttagggtggaagcgaaatagagcaagcggattagttctgtgaagtattgaggattttctgttttaaaaaccaaaaaaacttgataaaaataatacttttcactaaaaaagttagactataatagcaaaaaataaaaaaatttaaggagagtataatgtgaaaaagaatttagaacagatatatgctatagaatttacaatgggtttaagatataggccaatgcaaattaggcataatataaagttgattttcttattgcttttatttgtgacttggctacaaggtgactttatgaataggcttccgggaaatctagatataactaaagtagatatgcctttagtcctactggctttgctttgttatattattttgtatccccaaaaaatgactataagatttcaaaaccttcaatacctattatatatttgttgttttcagtttttagtatttatggttataagatacttttattctaacttgatttatggtattcaaaacatggttagtttaacagcccagactctggttgcctcatatgtatttttattagtattatggatcttagctttaatttttttctattttcattttagaaaaaaattaagaaatggagactatagaaaagattctgaacttcaaaaaaaacgtagtaacttaggattgaagttaagtaaaggatcttacatattaataggagcattttttgtttttatattgtcctcacaaattgttggaggaataatggtagatataatgattatttctatagaaattgtaggtatcgcattgtgttctatgggaattgtcatatttccagaacaactttttactgcatattgtaaatttaaatttaaggagtttcatatagaagaatagaaatatcatcaaaatagttaatgtatgaaggaatgatataaatatgtgcagattgtagtattagtaaaatcggcctatggcaaatttgtagttagtaactttgaacagtgtttttatttaagattttcagtaattaaatttatatttattatgaaataaaaattttggcagaagtagataaatcgactattggcgaggtagaaggagtcacgtttcaatcatactttttaatcaaaaatatgttgcatactagagttgttggtgatttggagaagcggctgccggttactcttgagaaaatggtagaatatgtggaaagtaataggaaagaaattattacgcctattttcatagtattgaattatgtgggaaatgtgccttatgtggatgtgtatgttggaattgatccttatgatgagtgaggatatttaattgaattcccaaaaatgataatcaaaaattgagggttttcagcgggatgataataggcatgacaaatataaatgattgctgaaatcatgaacgatatgaacggtaaactagcgtccatggttttttagcaacacaaattattatagaaatatgggactggtaaaaagaacgagtataaagataaaaactcggttgacgattggagatataaggcttttcataaaaaatatagaaaaagagatggagtttaatccaaaaattaatcgaaacggattaaaatcgctccaccagactttgaactctgattgtgtagagatataaagtaaattgggcagtctaagatgaaatatttatacatatataattataagttcaaatgtgaataagtagagtagtagattttctcaagtaatgaagggaagccgcagcatgaacaacttataacagtgaagttaccgccagaagcagattatttaaatgatgaaaccttagaagtgtatgagaacgataaaaagaagtatgaccagacaaatcaactaattactaacaattcagttacaattctattaggtgatttttgctattatgagtcggcatggagcagtaggtggagggataataggttttggattgggagtaaagtaagttaattataaaaaaaggaggaattgttatgaaaatagatttagaacaaatatacatattagatttcacaatgggcttaagatttcatccactaattatcagaaaaaatttaccgcttctttatgtagcgtttatttttctgatttggatacaaggagtcgttatggctggattgcctggagattttgacacaacggaattagatgttttattagcagcaattccagccctgcctttacttatattatatcctaaaaaaatggcaatgaaattccaaaatgttcaatatttattgtatgtatgtttcaattgatgatatttatgataataagggtattttattttgctatattttaccttcttgaaaatgaaatcttagtaactgctcaatttattaccaatgcttatattacattatgcattatatgggtaatttcgtttgctattttttcttttcgttttaagaaaaaattagataaaggcggttatagaaaagattcgaaattgcaacagaaacggagtaatttaggtttaaatttaagtaaaggaacctattttctaattttaggatcttttggtttgtttattctaataagaatgttaattggtggagaacttgaagaaattataataagtctatttcttattgtatgtattcttattggtatagctggagtatccttattcccagaacaccttttcactgcatactgcaagtttaattttaaggaatttcatatcgaagaatagggagcttaatgtaaatagctattttgtgaagttcctaatggttttctatccaaggattgcagtaattaagaactactttgaatatggcaataacaagcagaaaaaaaaggcaacacttacataaaaattagactcaatccaaaaaataaaaaaacatccatgttaattttcctggcacccctccccccccacacctgctatactaactccatcctaacaaatggagttgaaaccaatgacaaaaaactttaaaaaactaaaatccctacacgaactacccaccccactaatcctctacaactgctgggacgtcgcttccgccagagcaatccaacaaggcggagcaccagtaatagcgacaagcagttatgcaatcgcagagtcactcggcgctgtggatggggagcatttaacttttgatgaaatgttttcagttatttcgcgcattgccgagaatgtgagtttgccgctaacggtggatatagagactgggtatgccagaaatttggaggaactggctcagaatgtggagcggttgctggcgatcggtgtttgtggtgtgaacttggaagatcagcttattggcgttacaaatccggggttatgcagtactgaggagcaatgtgataaaatcaagacaatcaaagaaacggcggcgaaaatgagcacggaaatttttatcaatgcgcgtacagatgtctttttccaagggcgggatgaggcggtggacttggtggaagaagcgattagccgagcgaatgcctataaagaagccggcgcggatgctattttcattccagggctgttatcgccgaatttaattcgcgcatttgttgagaaatcaccacttccggtcaatgtcatgaggatggatgggatgctctcaaacgaggacttacaaaaaatcggtgtgaaaagaatcagttatggaccgtttagtttttttcaggctaatttagcgattcagcaggaagttgagcggattttcgaaggagggaaagccttgtgataacgaatcagcgggatattgataaatattacgacatgttagtggagaaaaattcgaattatgaaggcgtattttttgttggagtgaaaacgacgggaatactttgtcgcccaacgtgtccagcgaagaaacccttaaaagaaaattgtgagtttttcagtacagccaaggaggcgctacttgcatcttaccggccttgcaagcgttgtgaaccgctctccaatccgacgaaattgtcgccagctgtgaagttacttgttgatgcaattgagaaaaatccggagaaaaaatggacggataaagattttgatgatttatccattagcgcaaatacagcgcggcgccagtttaagaagcaatttggaatgacttttattgagtatgcacggtcgcggcgtctcggtcttgcttttaagcatattcggggtggaaattcaatcattaatgcgcaacttgatagtggttatgagtctggaaatgggttccgagatgctttttcaaaaacgatgggggaggttcctcataaatcaaaagatatcaccattttatactccgcttggcttgaaactaaacttggatcaatgctcgcaatttctgatgatgatagtctattgcttctggaatttgttgatcgaaaaggactggaaacagagattaaaaaattacgaatgcgcttaaacgcggctattacacctgaaaaaacaataataattcaacaaatagaagccgaattagcgcaatattttaatggagagttgattgattttaaaacaccgattcgctatatcgggtcagattttcaggaaaatgtctgggaagagctacgacgaattccgattggggaaacaatttcgtacaaaggtctagcagaaaaattagggcgatcaacagcgagtcgcgccgtggcaagagcaaatggggccaaccaattatccctcatcgtcccgtgccatcgtgtaatcaatactaacggagcattaggaggttacggcggcggtcttgctcgaaaagaatggttaattaaacatgaaaagatggttccaaagtaacgcggaaccatctttttttcatttatttaacccgtatcccaaacaacggcatcaaggcaggagcatgagaaaaatcaatgctcatgcccttcaaatcttgcggcattgcagtgatagactcaaaaatgcaagagctaagatcaatcccatttagcgcgcaatttaaaaactgcgctttattcaaatcaagtcgttccaaatacgtatcgacaagttgagctccactgaaatcactgttcgtatacgcgcccgcctcaaacgccacccatttcaagttagcataacgaaaggcaacataatccgcataacaatcaacaaaaacgcaatttctaagcgtagcatcactgaaattcataccaattaatttacaattttcaaaacgaactcggtgaataattgcgcccattaaatctaaattcgacaaatcacaatttttaaatacaacatcagtcaaattcgcgcttacaagagaaacagaatcgaacacacacccatcaaaaataatcgtttctaaatgaaaatgctcgaaaatttccccggttagcgtcgtttttctaaagatttgctcactaacttctccaatatcttcaataaaatatgtatcattcggataaaccgtcaaatccccatcaggaatccgcggcgcagtaatttttttcattatatcgacctcacttccgctttcattataccgtattttgctaggaaaaggagcggaaaatcgtttacctttcataaaaaacggattacaatgaatgtagaataaaaatggcagttgaggagtgaacgtgatgacagcgagcgtatttgtagcaggaaaattactaccagaaacgatggaagctcttagcaaatgggacgttaaagctttttcgggtgaggaaaatattacagaagcagagttaataaacaatgtaacggaagtggatgcgattatttgcccgctttcttccccaatttcggcaaaagtattggaatcggcaaaaaatcttaaaatcgtggcgaatattggtgccggttttgacaatatcgatgtaaaaaaagcgcaagaattgggcattgcagtgaccaatacgccagatgtgtcaacggaagcaacggcggaactaacgcttggattaattttagacgtagcgcggagaatttcagaaggcgaccgattatgccgcgaaacccccgagcaattcaaaggctgggcaccaacgttctttttaggtactgaattaagtggcaaaacgcttggaattattggattaggaagaatcggtcaagctgtcgcaaaacgtgcggctgcttttggaatgaacattatttattctggacaccagccgaaagaagcagcgaaagagtggaatgcagagtttgtgagccagaaagaattattgaagcgcagcgatgttgtaacaatccatgcagcatacagtcccagcttgaaacatctgctgaacgaaacaacactgaaaacgatgaaatcaagtgcttttttgatcaatgctgctcgcggtcctgttgtggaggaagctgcactgattaaggcattagaaacaggcgttatcgccggcgctgcgctggatgtgtttgagttcgagcctaagattggcgaggattttgctaaactggataatgtcgttttaacaccccatatcggaaacgcaaccgtggaaacacgcgcagcaatgggcaaaatcgctattgcaaatgtcgaggctgtattagcaggaaaagcaccactacattctgtttattaataccgaaaaatatagccgcagcgagtggctgtggctgtgttttatcgctgaattatggtataatattttttgtcggaatacgacaacgggttgttagctcagttggtagagcagctgactcttaatcagcgggtcgtgggttcgaaaccctcacaacccataaaaaacaaacgccagtgactgttaaagtcgttggtgttttgtcgtttttacgggcaaaatgttaataatttcaataataagctgatttctttttgattatttatcgattacatagaaaataagtggaatttcaaagtatctaataatttactacatgatatacaaaaggagttgtttcagtgagtagaattgacatcggagaaatacaagcttttttataccagctacgtgcaaccaatgaaccaggaaggaaaactatccaatctatcaaagcggccgtgacaaagtatgtgggagataatagtttaaaaggaaaagcagttgatgcatcgaaaaattattatcaaatgacttatttccctctctgtgatgcaataatcgaagctatggacgaaagtgaagaaagattggggcagtacatccaagattttcatgccgaagttgatagctcaccagatgccaaaatcgatgcggacggtttatatgaactgggtaaaatgattgaccgaatagaaagcaaaaaagaagctttagcacagcgaatgaacagtggaacagaaggacaaatgcagaattaccgttcccagttagctattgcgtataaacaggaaaatattctcgaaaaatatttgtcatttgaacaaagccatgctaacttttttgaccatttgattgacttggttcaagcggttcagcagaccatccgcgaacttcagtctaatatccagttcaatagccaaacaggcacttacgatttaagtaaactgaatagtgctacagtgagtcgaatgcaacaagcattgaataaatcacgaggtatcaaagaagacattataaaagaactacgggactacacagtgcttgcagtggtatatttagatagtaatggaaaagaacaagtcatgtggttattagaacgagacggcgtaggggtagagaatgcggaactcaaagcctatttaacagaaaatggaaaatacttaaacccagaagactacacgattattacgaatgaagaattaaacaagaaaatcaaccaatcttggcgagatggtgtttattatctaaatggtaataagtatgatggactaactggcggcgtcttatctacctcggcatatgttgaagctggaaaaggatatatagataaaagcgggtttgcggatgttgtactggggcttgggttgagtacggctgcgattagaggtagcctagtatataagaaagttaatgggccatataagcaaaacataaaaaacagatatcctaatgaggttcaacaagggaaaattttcgattatactttagaaaatggacaagtgaaaattcgtgatggcattaaagaagttgattttataatagatctacaaggtaatttaaaagttggtagaggacatgctcacttgtctaatggaggggatgtgcaagcagcaggtaaattaaaagtggactcgaatggtaatgttagaagaataactaatgaatccggacactatactcctacacttggacaggcgaagaactatcaacaaatttttgagaataccggaataaacactaaaaatgcttggttggaaacatatcaactagatgtaactaaatctggttatgtagacttagcaaaattgaagagaatagattccgtaaaattaaagtaaaggagtgctcattatgagtaaaacaactcaaatgaatagcgaaattttccaaataaatttagagaaaactttaaaagagataatggtggcaaaagggcttcaaagtgatgaaatcagatttgtgatagtccccgtagaagaaaaagggaagatgttagatggtagtgatgaaatgatgaagcgattagttttgactaaagaaaatataggtaataaacaattagtactaaaagatgttgtagatgttttaggtggattattccctaaagctcctatttggataaatgtttcttttttagaaatgaacggagaaaaagctatatttaagctggaaacgagtttgcgttttagaaagccgacactattaaggaacgctgaaacagggcacgcaccatttaaagcgataacttaatttgaatacttctttagataaagtgagacacttgaaaggacaatcttagtgttttaaatattagtaactatgaaataattgttaattcaggtttaataacacgctaaaaccataatagtagggaagatttttttaataatgttatggaatatcttaagtaggaggcattatagcaatgtttaaaacaatagtagatacactaattgctcaaagaagggacagaaaaattaaagaatcagaacggagacaagaaaattaccgagcgaaaagagaaaatttaactgaagtatatagatctttaatcttaatagttaatctatttccaaatgaatcaccaactgatattattaaaaatattaaatacggtccctattatagcttagagaactacaacgggatttttcgcaccctagattataaaattgaagattatgagaagcgaaaaagtttttcgaatcttgattatgaagaaaagaatgatattgatattgaaatatcaaacatagaatatgctaaagataaacttgctaggaatcgtaaatcatatcaaaaggctgtaaaatgttttaatcagtttaaagactcagataaagcgatttttgatctttatgcgggtacacatgttcagaattgtcttgttaattttgaaattaccataaacaatgtttttatttctgggatgagtgtgggtattccagatagtccttatgagaatagtatcaaaatagctagtcgaaaattaattagtgctatgaaaaaagatattggaattacttgaaataaatatatatttttcatgctactataaaaagactttgttatagtaataatagctttattgaacatagagcatagagactttcaataagtataaaggtattttccgcttaaacagcggattgtgagtttgaaacctcaacaagccatattggaaaacctcataaacaatgcgtttaagcgatttttgtgaaatttcaatccacaagaatggtatttttatccagtaatttactaattcgataaaaaccaaccttcacccaacaggagctaacatgaaaaaactaaaacagctaactaatcaattatttacatcaactatcttcctagtcaccatgttatttatcatacccccaacatttgcgatagctgatggaagtaaagtgagtttttatgaatatatatatggagcacctttaagatggctaactgtaattagtacaactgagaagaaaggtgcatttttggagatgtttttctcggagaacgaaggaataaatatccaatggctcaacctaataataaacttcctcctagttttccttgtaataacaattatcttctcactagcaaaaaagttttacaataaaaagaacgcctaaaaaagacaacccataacaggttgtctttttctataggaagtttcaagttatcttatactgtaaacgagaaaaattcactttttaatgttgtcagctaaacatccagcttcgcaaccttctcctcataaatcccaatcttcctaaccactgtatccaaatctttctgcaagttttcaatctcttgctccaaaacaatcttcttctctttcaacatattcaatcgttcggaaatggtgctgtcgcctgctgtgcgccaaatggtgtattgttttaattcttctattgataatccggcgccttttaaatgtagcaaaaatttcaaccaattggcgtcttcttcactgtatgtgcgcaaattattcttgtcgcggtcaggggttattaagccttctttttcgtagaatctaagggtgctgctagggatgcctactagttcggaaaattcaccgatagaaaaggacatctaatcacctcatctgtgtatttttcataaggatatcatttttaataagaaataattattttccgatacgtttattttcggcggctgagtatctatcaccaacaatttcaatctgcgataaagcatcagctattttttgtcgtgctccatcatcaaaatgaatttcagtggaggcgatattttcttctattctgcttggtcttgttgttccgggaattggcacgatccaaggtttttggtcaagtatccaagcgagggcaagttgggctgttgtgacgttttgctcgtcggcgatttctttcatgaaatctagtagtacttggttggcttccatggcttctttttggaatcttggtaagccaccacggttgtcgtttgcattgaagtcagcatttatatctaattttccagttaaataaccacgacctagtgggctgtatgcgacaagcccgatgccaagttcttctaaaaccgggaatacttctttttcagcttctcgccaccagatagaatactcactttcaaccgcagctagtggctctactttatgagcacggcgtattgtctttgcgctggcttcggagagtccccagtgtagaattttcccttcttgttttaaattctgaatggtgccggcaacctcttcaattgggatagaggggtcaattctatgaatgtaatataaatcaatgtaatctgtttttagccgtttgagagagccttcaaccgcggccttgatgctttctggacggctatcgacttcgttatttaaaccattaattttaaaaccaccttttgttgcgatttgaacatggtttcttttgccaaccaaagcttctccgacaagttcttcgttagtataaggtccatacacttcagctgtatcgaacatcgtaatccctgcatccattgcagtgcgtacgacttcaatcatttcatttcgatctttcgcaggtccacgatgataatttagccccatacagccgaatccaagctctgaagtaactaagccagcatttcctaattgtctctttttcataaaaacatgctccttttaaaccaaatttttaaattagaaatatcaggatgttgtatttagtttatcagttgaagtgaactttaagtcaagcgtaactaatttatttttaagagcatcagacagtttaataaaagcgatgattaattttattttattgattgaggcttattctttgctcttagtaggaacaattgcatgaaagcggtcttaaataagcgctaggaatgattttagtagtttcgatagtactaatatatcgagaaatgttacgaaaaaatgtcagcaaatactcaaaatcacgtaaatcagttgtaaatgagtatacgaattaaacgccttttctaagataataagatttgtgatggaatttcagaaagggtgataacaaggatgaagtatatcgattaccatgattatatgcataaagacgcgataatatatgcttatctccaaaataatttcccctatattcgcaaacgaataaaggcatgggaaagttttacactagatagagaagatattttattggtgaaaagtggggcaatatttgaagaagttaatgggaagaaaaaagggatagcacgatgctttttttcgaaaagtttaatttttcctactagagatccaatagtattgaaagctttcgaaacttcagaaatttgttttatcaatgctgaaagagccttcggaaaattagaagaagatcagattttatccaattttttcctgcagattgcggagaaaaatgaagaagacatgcgcagacaagcatttcttgggacggaaaactcaaaaaataaaattatttctacgcttaacttcttgttggaaaataataaatctaatagcaaaacaccaatttttcctatatggcttcaaataaatgttttggcaaagctagcaaattgttctatatctactatttcttctactgtaaatgaactacacgcagaagggatattagatataaaatcttcgccttggaaacttaaaggcaaggaaaaaaagatagaaattcttgaaaatgagaatcagaaaatgaagcttaatgaaagaaagcataagagtaatgttttctaacagtactgaaattgaaaaaatgttatgagtacttttccgagcacaaaaaatcatactaaaagaggtggaagtagaacttgaagaaaaatattttagtcgtaattattgtttcggtacttgcaattagtgcaattgtatcagcttttttcttaatgagagacgatgcttatgctattgaaacggaaggctttacttatagcccgaaaggaaaagtagtagatttttcatcagaagcaaagtataacgatacatggattaacaacgagaaaacaataacagataaaaaagaaatgaagccaattaacctagcaagaacattatttttaaaagatggacgaattcaatttttaggaaaaagtgtagctgttaaaagtgcatcggatttgattgaattaccatccaaaacttctataacagagagtaaaggtagttacaaagcaaaaagtgatagtaataaaacattagcacaacttccaaaaggcacggttgtaaagcttgcagaaggaagatatatcattttggataatgcctacctaaaaaacaaacaaggtcttaataaaaaactacctaaaaacgtacttgtttccatagatgaaaataaaaaagtgatgttaatgggcgataaaaccatagaagaattaggcggggacgatgcttatattgaaatggagaacaatcactatcactttgacttgaaaaaagaaatgttggtcagtcaaacagcaaaagaaacagatattgatatccgctccattaaagtggaaatagatgataatgccgaaaaaagaagcctaaaaacagcaaaagaaacggaaaaagaaacaacaaaagattcaactgaaaaagaatcagaaaaacagtcgaatgatgcttctggacaaaaatcagcacaaaataatgagcggtctgaaagtaaagatgatcaaacacaagacgcgtccggcaacaacacaaatggaagtgcaaataacaatacagcgagaagcaatggaacaggcggaagtaattctgatacaaatggttctcagcccgggggtacgcagaataaaccaaatgaaggggatgttaataaagcgaatgaaattattaaaaagctaaacgaagctgaaaacacaaacacgtttcaagtaccaattgtggatgttaatttgacggttaaaggtcaagtggctgcggctaaactaaaactgacagactcatccaaaaggctaaattccttagaagcaattctttacgatagtaagaacaatattgtaaaaaaagaaaaattgaactcaacaaaagcgaatcaaaacttcacctttaacaatttaaaatatggcgaaacatatcaagtagttgttcagggaagctacaagtcagcaagcaataaaaatcaagatactattttcttccgccaaacggttgaggcaaaaccggttgttttaactccaaaagtgacggagcgcggcgaagattatatgaaagcggaactgactgcaaccgaactttacggtcatattgataagctggttttaaaaatcaaagaaaacaacagcaatgtaatcacttctcaaaaagttactgttgatgcgagtcaattaacaaaagacggacaagtagaagttaagtttaattcattaagtagtgataaagaatacattatcgaaatggaagaattaattgttgatggaaaaaatgtaacagatgatggttggtactttatttcctctacattaaaagcaaaaccaacaattgaaggcttaaatctttcttatagcacagataaaggtgagtttgttgcgtcaccagttaatctagttgatagagatgagtcaattacaagcattcgatatgtagcgtatttagaagatgactataaagtaaatggttctaatgccaaggaatacgcttattctgtagtagacgctaaccaaaagaaaacagctgttaaagttggtcgaacagttgatatgaacgatggtaattatatttttgtgggttatatttctggcaataatggtcagtcagattacacctttgcaactccagcttcgaacagtgtagtcgttggtaaaaaaacgaagccaactgtagagttttcactgaaagaggcagagcaagataaactgacaatcaattatgaagtttttgatgcagataacacacttctttttgataacctaacacatccaaccttaaaactatataaatcagatgctcaaggcatgtatagtggaaatcctgttgctacagttgatttaacaaagaaaagtgatattacgaatttactagaattcgatggtttagaaagtgaagcttattatgttgtcgtaatgacaggttcctataatttggacgacggagcagggattatggttgatgagcttattggtcagtcaagtgtcttccggacaaccgaaattacaaaggtcaacgcatcattttcacttgattctgtagatacaacaaaagtagcaattaatgtcaaattgtccgatgcggctgttaatttaaacgacgctaatttaaaaatttatgaaaagaaaacaaacacactagtcaaaactgttccgctccatggggactttgagaagttaatgagcgattcgggaaatagttatctctttgaaaatttaagtattaataaagaatatcttgtgaaagtagaagatggctatgatagtggaatgaatcatgttccggttgaagggcaatttattttcaaaaccaagaaagaatcacctgaaacagacaaagtattgctagattacaaagcttctgaaatgaaattaggaggcctagcgggaatcgcggcaacagaaaagccactaattgatgattataatgctgttagttctattacctacagtatctataaagcagatgatttaaacacaccgcttgtggaacaagaagtttcaacagcggcagactttgagaagaacgtgtactttgatttaactaataagctcttaggacgaggttattcttatgtcataaaagcggatgttgtttggaatgataactatgaagatcatcatattgaaattagttctgatacaatccaaatcaaaaaagaaaaaccaaccgttgaatacgaaattttaagccgcacagcgagcgaaattaaattaaatgtatatgtagaagatgaggaagaatctatcgtaccgggaacgcttgaaattactagtacgacaggtggtaatgagcaacttcaaagtggaaaaaataatgtaaccttaccactttcaagcgagggaactacaacaattaaaacaacaggtgattacattattaccagcggaagttcagctatttcagatatttttatgacgaaacagttggcagcattaaatactactacaccacaagttggagccaaaattgccatggatgcttcgggcaaatcaatgactatcgccccagaacctaatgcagttgcaaaaacttctgtgatgagaactaaatatgatttgaaagatgctgcaagctccaaaccagattattcaattacaaaatctggtcctaatcaatttaatactcaaaaccttaatttgcctctaggtaatatttggtttgataattcctatcagctaactcttgatatgaaaatgaattatacagaaaacaaaatcgataaccaaaacctagccaataattactatctatctattggaaatggagcatcatttgttagctctttaagcggagcggtttcgacaacgaataacgtaaatagtgcggatgttttcaaagtaacgaaagcaagcaccgatttagaaggtaatatttccggtgttacatttaaaaatatttggactgataagtatatagcttatcgaaatggtattttgattagtaatagcgagactcctgattcattcaaattaatccgtcaagctgatggaagttatgtaccagaattgagtggtcgctatgttaatttctctgttggactagtaacagatgaagcagctggatcaaaaatcgatttatattcaactcaggaaaaattagaacaagtttcggaagctatttctgtaaaagcacttgaagagccagctatttcagcagagaatattggtgtttatgataaacgcgtcaaattagacgttattggtgaagataaagataatacaacagttaagaaagccaacaagaatgagttatttgtaaatgtttataaagcagatggaacaacacttgttaactcaattcgagttgatggattaccgacgcgtgatgtttcagttacagagctttcaccagacaccgattatgttgttaaagtagaaggaaaatatgatttgttagatggtaatggcgaaaaagacaaagtgtattattcagagacaattaagacagaaaaaagcttaccaagcatgacttcaactgattattcttggagccctgcatatggccagcgagcgattaaaggaaaaatcgattttgctgatgaaagtagcgttttaacaaatattgaatatcgtttgtatgatgctgcgacaatttcttccagcttatctaatttagtagctttagaacaagagttaggtaataaaactcccgtatctacatttgataatatgacaaataatccagaattttctatatataacggttctggaactcaaaattttgtttctgggaaaacgtatgtaattgctgcatatatgaaaactagtctaacaagagcgcctatcttcctaagtgatgccaaagcggtctatatttcaccaccaagtaatgtttctgctccgattacgctagaaaatgtttcaacaagagaagcgactctgaaattctcttataacgatccgcaaagttattttgttggcggaacaaataaagatttccaatacgtattaaaaaatacgacaaccggtacagaagttaaaaaagggtcatttcaaggtgggaatacagctagttggataaatacttttgaggatttagaacctgcaactggatacacgctaacaattagcacccaatacgataatctaaatggtggattagtaagggcatggaatactagcttcaatttcaccacagatgatgaatatgtaacttcgaactcacttaccattcagctagatgctggagcaaaagcagttaagttacaggctaaagaagtcagaccgggatctacaacgattgaaaatattaaaatggagttctatgagctaatcgactacggaggtaataatgaacgtacccaattagttgaaactaaaaatatcactttaccaagttcctatccagcaactattgcagcagattttaatgtggcaggtaagaagaaaaatcaaagtttcttgggtaaaatgattgtcacttatcgaacaccaacaaatgaagttaaaacgtatgaaaagacatctaatttcattactttgcaagaagatattgccgctgggctcaaatcatttaagagcgtgcgagcaacaaatgacgctttagaagtaaaactagatattccgcaagataattcaaccgacaaggggagttacacgtatgagttgaagaacgaaaatggtgatgttattgatacagaaaaagttgcagcagaagatatttctaaaactgtatcgttatcaatggaaccaacgagtaattatacgttgactgtcattaatccagataaccagcccgtcgcactttatcaaggcaataacgaagaaaataatctgaaagctgaaatcaaaaaagatagttttacactgatgagcaataacacagccgatgctaaaactacaatgacagtaactgtagaacctaaagaattaacagcgtggcaaacagttcaatcctggtttggtaaagactttacagaaacttataatatccaaaaagatgagctagatacaggtgtgaaaattgatacaaattatcaagacactaaagttactgtcgaagaaacaaaatcagggaagaattttggaattattgaattggaggagagcaaatgaaacctacatggaaaatagggataatcgttgcagctgttccgttaataattatcgctgtcgtcttatggggatcttttaaggaggcaaggtataatcttgtctctctccctgatgacggggtagtcctaaataatgagcaagagacattgcaatttcagaagggcaatacgctttatcgtagttggaatagtgatcaattaattgcgaaaaacgataaagaagatactcgaaatgaaattatggagagtaccatactttatctaaataaagaagccttaatgtttactaagagtgttcctgtcattgatacaaatggggttagtagcaaactaaaaggaagacaagtctatcaacagaccaactcttcctataaatataaaaactccgaaattgtggaaaatagtattgtaaaactagcaaaccgtcaatactatctaaatgcagatgcaacactttatctcggtggtaaagaaattaaaaaagtgactaaaccgctacttttgattgataaaacaggtagtgtcactatttatgaaaataaaaagaaaagccgttttctgggtcatatgacgttgaaagtcaatgataaaacagttttagatgctagtaatgaaacgtataccgttggcgaacggaagattgatttagctagctttggtgggacagacaatgaaaagattgtcgtaaaagaagatgaaaagaaagaagataagaaaaagaccgcagaatctgcgaagaaaacagcaagtaatacctctcaatcagaaaatgaaagtaaccaaacaacaaaaggtacaggcaatcaactcaatgctaccaaaaaatacggaaataatttaaatgttggaaatggaacttctgattcagaaccaaacgatggtaaggatactaaaaataacggttcaggaagtaatgcgaatggtggaaccaatcaatcaggtctgaatgaaatagatgactatgaagctgttttacgtaaaatagaggacttaaataaaaaattagagcgaaatattccagtgctaagaatcggctatatcgcacctggagtgaccagcgtgaaagtcagctataactatgcagatccgaataacactttaattggcgtcactaaaattagcgccgtagatgaaaaaactggaaaaacagttaatacgcaatatgtttcagcagtagatacggaagctacactaaaaggactttcgccaaatggcaagtatcatcttgaatttacctatcaatatgatttaggaacaaataaaggcattcaagaagttaaaatgcaaagtgactcatttacaacgcaaactgttgccgcaatttatcaaatgcaaagcgttacaagcacaacaatgaaagtaaatatagcgcttgatgcacaaattgatgatgttaaacgagcaagaattaaagtaaccaagtcagatggagattttttctatatgaatgttagtgcgaattttttaaatggaaacggagaaattcttaatgcaacagggcttaagcctagtactgcttaccagtttcaaacagtgattgaaatgaaaaacggagaaacaattgaactaaacagctccgagaaatattacactatgcaagcaactgtattaaaaaatctaaaagctagtcagtctgtgaataaagttttacaagtgcaatatgattggagttcggctgattacaccctaaatcaagcaatcatcgaactggaagacgaggaagataatacagaagtagattaccaaattgttaaccaagaaaaaggtaatattcatcttgttccagacacaaaaagtgagttaatcaacttaaaagccaaactagtgctcaaaacgacaaataataacacaaaagaaagcaaaacatttgagtatcctgttaagcaagaaattgaatacgacaaacaagctaaattaacaatggacttaacgccatttcaaactgaagaaaatagtgaggctcagaccgaaaaacaagatgtagtagcagagaaagaaacgaatggaaatgatttaacagctaagatggaagatgttttagcccctcaaaacgcaacttatgatatgtccttttcgatgcaacgcaaagctctcgaaacctatcagttggcatttgaaaggaagatagctgggatagacgatgataattggaccatgtggaagagtcaacaagttacaacggatgaagcagggcaagtgaaggttacagaaaccatttcaaaactagctaaagatagcttcgattatcgtgtagctgtatacgatgcgcaaggtgcattacaactgtacgtttatcaaaagtagtaaaaaatgatatgcattttaatacaacaaactcaaacagaaagtaggaaataacaatggatttagtagttgcatgtagcgtaattggcgcggcactggcaattgggcttgcgactttaggagcggcaattggacaaggaattgcagttagtagagcaacagaaattatcggaaaaaacccgaacgcaaagaaagaagttatgggaggtctttttttggggcttctcatgatagttgcattaatgctatttgcactggcaattgcagtcatcttgctttgggttaatccgtttatatgatgggtgagagtatggagaaaatgattcaaacaataattctatatagtgttttcgcagtaggattcttatatttactgcatttcaccttaagaaaactagaaaatatcttgactagctttttttacgaagtgagtcaagatcagtcgcttgaaaaggaaagtcttttgcgccgtttaaaacgacaaaaagtggcaacaacacaagaagaacaaaaaaatcgtcaattggctattgaatcggaacaaaaagaagtgctttttttagaagaaatcgatcaattaatagctcaaaataaaagctatgaacaacaattgcaggcatgggaaaatgagcagccaaagcaaatcattgaggtgcctacgtttgaaacgacaccacacgcaccgtacaaatcgctaagtagttacattaatgaaatttttcaacaggtttttattgagtcggaagaagatgaagcgcgtctgtttacggaagcaattcgggaatttgatgcattagttagaacagaaaaaatacgttgtgcgctcccatacaaagtgattttgcatttatttgaaatgtattcgccagagcagttacatttatttgctcagtcatttcagagatatagtgagcgttcgagtaaacttcctgtgaaacaaatttaccaaagtagttatttatcgccagagcaaaaattaaaagtgatgcaagaagaaggtactttagatgagttagatgctgaatttatccaatttcttttttacatgatgacgcattactcttaccgccaaactcggaacctgtatcgtaactttttggaggtatacaatattcatttttatagaggtcttatttgcatccatgtagctagtaaaggctcagctaatcactttgaaaaactttggcagccggcgcataggagctataaaatcgagtatcaagtacaaaaagagttaattggtggagtgattattcaatatggttctaaatcaattgatatgagctaccaggaattaattaaacgatcaacagaaaaaatggaagcggaagtgaaactttgaaaacaattcattttgatatgaacaaatacgaaacccatgtggacttggaatatttgaaagaacatggccgagtggaaaaaatttctgatggagttattttctgctcaggcctagaaaatgcagcgctacatcaggctgttttaattgatgaaagacaccgaggcgtcattctggagctcaatgaggaatttgttggaatcggtttgattgataagacgaatgacattttagaaggtatgcatgttggggtctccggcaaatttatcgaagtagacctatttgaagaaatggcagggcgtattattgatactacaggaaaaatgctttatgaagaaagtgaagaaaagccgacagcaacctctccacttttctgtgtaactccagctattatgacgattgatagtgtaacacgcccacttaatacggggcttgcggtgattgattctattacgccaattggtcgaggtcagcgtcaattaatccttggcaatcgtcagtctggaaaaacacaaattgctgtagatacgataattaaccaacatgatcaaaatgtgcattgcatttatgttgccattggcttaaaagcagcttatatcgcagaagttattgaaactctacgaaatcatggagcaatggaatattctacggttgttgcaactgcagccagcgattcccttaccgcgcaatatttaacaccgtatgcgggtatggcattagcagaagctttgcgagatcaaggtaaagatgtacttatcattttagatgatttaaccaaacatgcagacgcttatcgagcaattactttactttttaaccgcccgccaggaagagaagcatatccaggagatagtttttatattcactctagccttttggaaagggccgttcaaatgaatgaagagcatggtggtggttctattacagcaatcccgatgatcgaaactttatcagatgatgtaacagcttatatccctactaacgttatctctattacagatgggcaattatttttaaaatcggatttattcaatcgcggtcaaaagccagctgtagatgtcggcgtgtctgtttcaaggattggcggcgacgcacaacacccaattatccgcaaattaagtaaaaatttaacgttgattctttcgcagtttgaggaattaaaagaattactcgattttgggaatgcacttgatgacggcagtatgaaaatggtatcggatggccgattattaacagaattattcaagcaaaaaattctaagcccgttatcagtaacggaattaatcgtcattttatatgctttccaaaatggctttctaacaaaaatcccgcctgccaatattcagactttcaaaggacttttgctagaaaaagcgcatatgcataaagattttgagtcgttttcagctcagatagaagctattaatgaactgaatgaatcgcacgtcgaaatgctagaagagatcattcgggaaactgggaggctttttagttgagtagcatagaccaagcccgaaaaaccattaaagcactaaattcaacctataaaattgtccatgtaacagaactagcaacacttggaaaactttccgctttacgagaaaaagcggaagcggctgttagttattacgaaactattttaaaaagtttgcgctgggtgaggaaaactatgtacaccagtaataaccaaataaaagaagaaaaaaatgttactgctattgcgataacttctgagcgtggtctttgcggtgcctataacagtgaggtttttgctgaaatcgatcaattgattgaatcactcggcgatcaagtaacgattaattgggtagttgtaggtgaacagggccaccgttatttaacgaaactaggtcagaatatcacctcttatttacagttttctcttgaaaatattgatttagaaaccactacggctgttactgctgattttattgacctgattcattcggaacaaatggatgcactatatgtgattttcacgaaatatttgaatgcggttcaatcagaagccatgtgtgaaaagatttatcctgaaattccagaagactcggatacagagctaattgaagtagattatgtactcgatttcgagacggatgacgaacaagtggagcagttattattagaaaactatttgtgtggcttgctttatagcatgtttcgttactcggttgccagtgaatattgcatgcgccgaatcgcgatgaaacaagccaaagacaatatccagaaacaattggaagaagctatttttgatgccaggaagcaagcattgcaacaaaaaactggcgaattactcgacatcattagtggagcacagacgattaggaaggacgaagaataaatgaaaaaacacacaggaaccattattagtattagtggttttgttttaagaatcgaatttaatgagagcgaactgcctgaaattggctttgcgcttgagtatcatacacatcaaggaacttatctagctgaagttgttcagcatactggaattaatacagtgtctgccatcgctattggtgaggtaagtggcctggctagaggtacggaagtcgttaatttaggacatccaattgaagtgcctgttggggaaactgttcagggaagaatgcttaatgtatatggaaaggcgattgacggtaaaccagagccagctgctgaagtgaagtggccaatattccgtgcccagcctttacttcgagagctagatacgaataaagaaattctttacaccggtattaaagttatagatcttatttgtcctattttaaaaggtgggaaaacaggtttatttggtggagcaggtgtagggaaatctgtcttaatgcaagaattgattaataacatcagtatgcttggtgggaactctgtatttacaggagttggagaaagagttagagagggaatcggcttgtataaagaattagaagcaagtggtgtgcttcctcaaacaaccgttgtacttggtcaaatgaatgaatctccaggtgtacggatgcgcgtggcattaacaggactaaccattgcggaatatctacgagatgaagagaaaaaagatgttttattatttatagataatgtcttccgctttattcaagcgggttctgaagtttcttctttacaagggaaaattcctattactggaggttatcaatccacactttccaaagaggtcggcgattttcaagaccgcatcgcgtctactaaaaatggttctattacctcgattcagtgtgtgtttttaccagcagatgatattgatgatccatctgcagttgcgacgtttagtcatctagactcaacaattgtattagaacgttcgattgcggcgcttgggattttcccagcagttaatccacttcaatcattctccagagcactcaatccaacctttgttggtgaacggcactatcaattagcggtgcaagtgaaatttatcttgcagcgttatatggaactgcaggaaatcatcaatgtgcttggaatggcggagttaagcgatgaagatagaaagctggttcatcgcgcaaggaaaatccggaattttctttcacaacctttctatgtttcggaaaaattcactggaacagaaggtacatttgtagaaattgaagatttactagggagtatcgaacgcattttgaacggtgattatgatgaacgctcagaacgtgatttcctatttatcggatcctataaagacttgaaataggaggagaataaaatgaaacttaaaatcgtctcgcctatggggcagttttttgaaggagaagtagaaggttttgttattaatacaaaagaaggacaacaaaccgtgttagaagagcatattgattgtttaagtttttttgactatagtgaaatcagtattttagatgcagttgcttcggacccaatctttgtggcgcttggctatttacatttagtacaaaatgaagcaaatattatggcacagttcgcttctgcggatgccgagcaagcggagcggatttttgaaagactcaataagcgaaaacaaacagagagtaggcggtccaatgacaagtgaattttttagtacacttctgttgattattggtttattgattggcttttttctggcgatattattgattttagcggggattcggcgctttttctgtagtgccgaggaacctttaaaacgaatccggcgctatcaagtatggcataatcgttatcaatttaatgaggaggttacttctttttttactgttattggggcaacacttttagtaagccttattacagtacaaattaccgcaattccttttcagtatacggtgttaatattttggagtagttggctattccacttactttctttttggaagaagatacgagtacctaaaaaaatgaagaatgaaatgatacaattagcaggatttcttttaatcacagcgctttattttgttggttattttgcgatgaagtcgttgcatttttctattatacatgtagcagatttccctggagttattcagttcggaataagaacctatctaactatttgtagtttgtttgtggcgagtggggcattaattgtttggcagcgcatctatgtgaaactattgaaatgactaagaatgcgaataacacataaccaagaaaaacgaggatgtctacgtggcatcctttttttataaatgaatatataaaaagaatttttctaacatatttctaacatacttgtactatactttaaataagctgttaattagccataagaaaatgaacgaaaggaagtaaattcaaatgacttttttagaattccatcaattggtcaaagaagatttgttgatttattcatggattataaaaaattttcatcttacgcgtcaaaaattaatggcgggtggggaaataacgatgaatcgtgaacaagtgatagttatggagaaaggtttactagtacaagtaaatgaagaaggcaaaaatgatctgtatcgtgtttttatcgatcaacgaataatttttacgacaaaaggggatattactttaacggcactagaagatacctcttatagcatcattcgaacagatgagttaattgggaaattagaagatcaacatttattaccaacttttttcttacaaatagcggaagactttgagaagggtttagactggcaaagaacactaatttctgttgatcctgcagaacgtgcggaaatgattttggtgaaaattatcgagcgttatgaaataaattcagagaacaaaccagagtttccaagatggttaagaataaatgtactcgcaagattcgccaaatgctcggtgtctacgatgtcgtcagttgtaaacgaactagtcaatgaaggtgacttaaatataaaaggaacaccttggttactgactcgaccttatcaggcatcttgtgcttaaaatagacccgtaaaaaaccacgcttaaatgacatttgcgtggtttttttacgtgagttatgaaaaaacataaatttattacgtttttttgatatagatacaacaattttcagatacactaaataatcaaaacggattttctgtatcaatagacgatacactaacagtcatagtattaatatagatattaaaatcattggtacataaggcttttaagagtaatactataaattggcacagaacttgcaataaatatagcgggtagcaaaataaatgaattatattaggagggaaaaagatggtaggaattatcctcgcaactcacggtgaatttgctgaaggtattttgcagtccggaacaatgattttcggcgagcaagaaaacgttaaagcaatcactttgatgccaagcgaaggtccggaagacatcaaagctaaaatggaagctgcaattgcatcctttgatagccaagatgaagttttattcttagtggatctttggggaggcacaccattcaatcaagcaaacggtctttatgaactacataaagataagtgggcaatcgtagcaggacttaatttgccaatgttgattgaagctttctcatcacgttttacaatggaaagcgcacacgaaatcgcagcaaatattcttgcaccagctcaagaaggtgttcgcgttaaaccagaagaactacagccgcaagtaacagctactgaacagccacaagcagaaatcgctgcagttggtgatggcaaaatcgaattcgttctaactcgtgttgattcacgtctcttgcatggtcaagtagccactgcatggacaaaagcaacacacccaacaagaattatcgtcgtttcagatgcagttgcaaaagacgatcttcgtaaaaaattaatcgaacaagctgcaccaccaggagtaaaagctaatgttatcccagtccaaaaaatgattgagatttcaaaagatccacgtttcggcaataccaaagcacttttattattcgaaaatcctcaagatgttttacgcgcaattgaaggtggcgtagaaatcgaacaagtaaacgttggttccatggctcactctgtaggtaaagttgttgttagtaaagtactttccatggggaaagatgatgttgaaacctttgagaaattaaaagaaaaaggcgttaaattcgatgtgcgtaaagtccctaatgactcaagcgctaacatggaagatatcatcaaaaaagcaaaacacgaattaaagacacaataaaaaattaaaataggaggtttattatgtctgtcatatcaataattttagtagtacttattgcatttttagcaggtattgaaggaattctagatgaatttcagttccatcagccattaatcgcatgtacattaattggtctcgtaacaggtaacttaacagcatgtatcatccttggcggaactctacaaatgatcgcacttggatgggcaaacatcggagcagccgtagcaccagatgccgcgcttgcctcagtagcttcagcaattatattagtattaggtggacaaggggtagcaggtattccgtccgcaatcgccattgcaattccacttgcagtagcaggtcttttcttaacaatgatcgttcgtacattggcagttccaattgttcacttgatggacagagccgctgaaaaagggaatatacgcagcgtagagtggttacatatttcagcaatttgtatgcaaggtgttcgtatcgcgattccagctgcagcacttttattcattccagcagacagcgttcaatctttcttagaagcaatgccagcttggttaacagatggtatggctatcggtggaggaatggtagttgccgttggttatgcactagttatcaacatgatggctactaaagaagtatggccgttcttcgttatcggtttcgtagtagcagcaatttctcaattaacacttatcgcaatcggtgctctaggtgttgcacttgctcttatttaccttaacctatctaaaatgggtggcggtaattcaaacggcggtggaggcggaaactctcgcgatccactgggcgatatattaaacgactattaataaaaaaaggaggagaatagaatggcagaaaaaatcgaattatcaaagagagaccgtctacgcgtagcatggcgctctacgttcattcaaggttcatggaactacgaacgtatgcaaaatggtggctgggcattctctatgattcccgctattaaaaaattatataaaactaaagaagatcgttcgcaagctctaaaacgtcacttagaattctttaatacacatccatatattgcatctccaattcttggggtaacacttgcacttgaagaagaacgtgcaaatggtgcagaagttgatgatgtagcaattcaaggggttaaagttggtatgatgggacctctagctggtgttggtgatccagtattctggtttacaattcgtccaatgttaggagcattaggtgcttctcttgccttgagtggaaacattcttggacctatcttattcttcgttgcttggaacgtaatccgttggggcttcatgtggtatacacaagaattcggctacaaagctggttcgaaaattactgatgacctttctggtggattactacaagacattacaaaaggtgcttcgatactcgggatgttcgtcctcgccgccttggtgcagagatgggtaaatatccagtttgcgccaattatctcgaaagttaaacttgatgaaggtgcgtacattgattggagtcatcttccacaaggcgctcaaggaatcaaaactgctttagaacaacaacaagcaggcttagctctttctgaaattaaagtaacaaccttgcaaaataacttggataacttaatcccaggacttgcagcagtagctcttacattcttatgtatgtggttacttaagaaaaaaatcagcccaattatcatcattctaggtctattcgtagttggtatagttggtcacttaatcgggcttctgtaaaaataagctgatcgaaaagaggctggtgcaatattcaccgagcctcttttgtttagatatatgacacagataaacgaatacggtataataaacaaaacaagcgaaaagaaatggagcgaatacagttggttcaatcgattaatacaaaggtagacttaacaatagatgccaccgcgtatactggacttacagattacgggaaaattatgattggcgacaaaggttttgaattttttaactcacgtgatgtgcgtaaattcgtccaaatcccttgggaagaagtagatcaagttatcgtatccgttatgctaaaaggtaagtggatccctcgctacgccattaaaacaaagcgcaacggcacatacacatttgcttctaaacgacctaaagaagttttacgtaaaatacgagtttatgtcgacccggccaatatggtgagctcgctaagtttctttgatgttatgaagcgctcgtttcggtcgatatttagcaagaagaaaaacaaaaataaataagccgatttataccgaaaagcttcaatggacttatgtctgttgatgctttttttcgtacataataattgaatagacagcgtaatttgttataatcaaaagtaaacaaaggaggcacaccaatatgaaaaaaccaagaatctacacgatgtcatttgctagtgtttaccctctttacatacaaaaagcggagaaaaaagaccgcacaaaagaagaagtggatgaaattattttttggctaaccggttatgatcaagattctttgcaacaagcaatcgaccaagcaattgatttcgagaccttctttgctgaagcacccaaaatgaatcccaatgcatctttaatcaccggagttatttgtggttaccgagtagaagaaattgaagataaactaatgcagcaaattcgttatttggataaattggtggatgaactcgcaaaagggaagaaaatggagaagattttaagaaaataagaaaaaagacagcctcctttgaagggctgtctttttatattgtagtgtattgcctagtgtattaattactcgtctttttccccgcactcctcaaaaaagtgactaataagactgaccagctcttgattcactgaataaatatgcgttgttccttcctttcttaaattaatcagttttgcttctttaagcagtttaatatggtgtgacatggtggatttggagatattgtaagttgtgccagagaagcgtttttctttgcttttcagtaaacataggaaaatatcaagacgaattggatcgcttaatgcttggaaaattaataataaatctgattttgagagctcatttaactttttcatataaatatcatatcataacttacattttaattgcgcggaacttgctgctatgttatattatgatagttcgaaaataatcgaactataaaatccgaaagaagttgttggaaaatgttgcatattgaagcgcaaattacggtaaagaaagaacaaaccgaagcttttttgcaggcggcgaaggaagttattgctgcgtcaagagcagaagcaggaaaccatggttatgaattagtgcaatcgacggaaaacgaaacagttttttatatgttagaaaaatgggcggatatggatgccattcaacaacacaacgacagcgagcatttcaaaaaatttcagaaagctgctgccgattttgttgctaaagaacttgaaatttcagtgttaacgccacttgcgagataaggaggagaaaaatatgacttatttaaataatgattttgaagacttaatgaaaaaccgccgctcgattcgagaatacgatgaaacggtgaaaattagccaagaggaaatgaaagctattttagaggatgcggtaactgctccttcttctgtaaacatgcaaccatggcgttttgttgtcgtagaaagtgacgcggggaaagaaaaattaagctcgttagttcgctttaatacacgtcaaaatgaatcttcttccgcgatgattttagtttttggagacttacagaattttgaaaacggtgaaaaaatttacggagaatcagttgaacggggcttgatgccggcagaagtgaaagaacaacaaatggctaaattaagccagtactttgcttccattccacgctcagaagctgaacgtgttgtccttattgatggtgggattgtggcgatgcaattaatgttagttgctcgggcgcatggttatgatacaaatccaattggtggttttgaacgtacggaagttgctgaggccttcaatatggatccagagcgttatgtaccggttatgattgtttctatcggtaaagctaaaaattctggctaccagtcttatcgattaccgattacggatgttacgacttttgcttaaaagagggcaaggaaatagctgatatttccttgttctttttttctttcttggttataattaaaataacatacagccaaggaggagaagcaactgtgactatcaaaataactcgtaaaacaggcattggcagcggtattactccggtgaaaattagaatcgaaaatgaagaaattgtaaaactcgacaatcatcagtctcatttttttatgcctaagatggagaaaacaaaggtttgcgtgactgattggttttatgggagtcaggaagcggttttggaaaatagtaatgatgttgttgtgcgtattaatcggaaagcccttctattaaattattctatgttcccgtttcttttttacggttttgttatgactagtttgttcgctactttgattgcacttggtctttgcttggtctcctttttttattcgcgaaagcattggtttgaatttgtgaaaattaaataataattaatcgatagtatgagcgaagtgcttgtgctatttttttatctgtgtaagtttttatttcatctgtgtatcttaagaaggagccttaaaccgccgaatgacagcgctttcttttggcatgataattgcatgatatacagatgctcggaatgaatctttaattggagggaggaaattagagagaagaacattcgggcaaccacacaaaaaggggtacagagagacaaacttagaactaccgaaatgaggtttataaatcaaaaatcggggtgaagagatgaataagaagatgaaaaagctttttagtattacttctgttgtgttgttagttttatcgttagtggttgtatcaattggtgcagagccaaaacgggcgaaagcggctgaaaatgtaccacagtatcgaaatgttatgtattacggtgattggtcgatttggggaggagaagggaacttttatccgaaagatattccggctgatcaattaacacatttgaattttgcttttctggattttaatagtaatggggatttagtttttactgataaagatgctgctgttggggcgcctgttgggcaagagggagttcaatggggcggagcaaatgcgggcgttttgaatgcgattcaagatttgcgagctcaaaatccgaatttgaaaataggggtttcagttggaggctggtctaagtcgggagatttctcgacagttgcagcggatccaacaaaacgggctaactttgtgaaaaatgtgatgaagtttgtgaaatataccaatatggattttgttgatttggactgggaatatcctgcttcggtacgggatgctgaccttgttgataataaaaacgatgaaggcacgccaaatgcaaaacctgcggacaaacaaaactttattacacttttacaagatttgagaacagctttggataaacaaggcgtggatattaacaagaaatacgaattatcggttgctttgccagctgcaaaatccactttagaaaatgggattgatgtagcgaatttatttaaagtagtcgattttgcgaatgtaatgacgtatgacttaaatggtgcttggacaccgaatagtgctcatcatacagcgctttatggcaatccgaaagatccgaattatgatagtggtttttctgtcgaccaaaccgttaaatacttaaaagaaaagggagcagtttcgaataaaattgttgttggggcagcattttatactcggggctggaataaagtagctgctggaacggatacggcattgccagggcttttccaagctgctgaaaaaacgaataaagatgcggatggctcgcttacttatggggcaaacaacgaaaacccaattaaaactggtgatgggggccgtgctggcggagtttgggcgtatagaagtattgatgcgctaaaagctaaaacgccaacattgaaagaatattgggatgatactgccaaggcgccgtatctttatagtaaggaaactggggagttttacacatatgacaatacgcgttcaattggctataaggcacagtatgtaaaagataataatcttggtgggatgatttcttggatgcagtcgcaggataaaacaacgacttcgactaagcgcgatgaacttacgaaggctattaaaactggattgttcggtacaagtgcaatcccgcaaaacgcaatcacatatgcgaatttaaatgtggtagcaactgtcaaaccttatagtgaaaatggcgttggatacgaaattacaattaccaataatgaaaaagcggatgaaacaaatgaagtcttgaaatcaactgagctatcgtttgaaacagtgaaattacctaagttttatattccagtaaaagcgggcgaaacgttaactgctggagattataaagcaggtactgttactacttcaggtggcaatacagtagttgatttagcttctgtatatgatgcacagcaaattccgcaaggcgcatcttatactttccgcttaaaatcaagtgcatctagtgtggatgtagctaacatttctaaaattgatttaacacaacggatggtaaaatcgagtgtcgaatttggtaaacaaactatttttggcggaggaactgttgtacctgatccaagcgatacagaagctccaacagtaccaaaagcactcgcatcttctaatgtaaccgataaatctgctactctaacgtggacagcttcaacggacaataaagcggtggctggatataaagtgtaccgaaatgggaccgaagttggctcagtttcaggaactacttttacagatagtggcttaactgcaaaaacagcgtacacttacacagtaaaagcgtatgatgcggctggaaatttctcggcagcaagctcggccttaactgtgacaacgcttgacgcggcaacaccaccagcaactccagcatgggacgctgccaaaacgtacaataagggagacagggtttcttataaagggaaaacatatgaagcacagtggtggactcaaggaaatgagccaggagctgaacagtgggggccttggttgttaataaattaatagacaaaaacagagattctttccggagaatctctgtttttatttgaaaaactagccaaacgtattacaatgaataaaagcgacaagagagggtgcagaggaatgtattttgtatacgatattggtggaacttttgtgaaatttgcgttgatggaaaataacggtacggtgaaaatgaaagataaattccctacaactgccaaaagtgcagaagaacttgtagctcaaatggtcgaaaagtggcgcccctataggacagaagtgaagggcatagctgtgagttgtccgggagtggtagatacggaaaaaggcgtgatttaccaaggtggctcgctattatttatgcatgagaaaaatttggctgaaatgttagcgcgtgaatgtcatgttcccgttgtcttgcaaaatgatgcgaagagtgcagctttagcggaactttggttaggtgtggcaaaaaatgtacatagcgcggcgattttaacgcttggaagtggcgttggtggcggaattattatggatggtaaattacaatctggttatcatttgatggcgggagaagttagttttatggagacttcttttgatacgaagaaattgcgaggtacattctttggaagaactggatcagcggtggagttaattaagcgcattgcatcaaagaagaatttacccaataaaaaagacggtgagcacgttttcgaattaattaaccaaggtgatgaagaagcgaatgctatttttgatgcgtatatttatgaattagcatctcaaattttaaatatccagtatttgattgatccggaaattattgcaattggtggtggcattagcgcccaaccggttgttgttgaaaggctaaacgatgctgtcgcagaaataaaagcagctaatccttatcatgccgcacaaccgaaaatcgtcacttgtcatttccaaaatgatgcgaatttgtacggagcattgtataatttctttttacaaatggatgcgcaaaataaaaggtaactagaatctctagttaccttttttctataaagcttgcaacatatcaaactgtgattgatataaattatagtaatagccgtgctgtgccatcagttcttcgtgactgccagcttcttgaatgcggccattatcaatgtagaagatgcgcgaactgtttttgattgtcgaaagcctgtgcgcgataatgaaggaagttcggccttccagtagtcgctcaagcccttcttggagtaagatttctgtttgtgtatcaatacttgaagttgcttcatcaaggataaggattttcgggtcggctaaaagagcacgggcaaaggaaatcagttgtcgctgaccagctgaaagggtgctgccccgctctttgacttcggtataataaccatcttttaatccggaaatgaaatcatgagcgcgaacgactttggctgctgcaataatttcttcttccgtggcatctagcttcccgtagcgaatattttcgataatcgttcctgagaaaataaaggtatcttggagcatgacgcccatttgggacctgagtgatctaagtgtgacttcttcgacattctccccatcaactaaaatttctccggaatttatattataaaaacggctgagcaagttgatgatggtcgtttttcctgcaccagtcggaccaacgagcgcaatcgactcacccgcatccacatgaaagttaattccttttaaaatgtccacgccttcctcgtaacggaaataaacatctttaaagtcaacatttccaacgattggcggcatcttcttcgcgtttggtatgtctttaatgtctggctcaacatccatcgtttcgaaaatccgctccaaataagtcgttgcggtaataagcgaattgtagaagttaccaatattaataacgggattccaaaaattcccaacataaccgatgaaagcaatcagtgtcccggtagaaacgtccacaccgtaacctttgattccaacgaagtaaattaaacaagttgtcattacggcgatattttgaacccctggccaaagcaagaattgaattttcaccgctttcatccaagagcgacggtactcattacttacctcggtgaaaatctcaaaattctcttcttcccgtgaaaaactttgtgtcactttaattccagcgatgctctcgtggatataggcgttcatgttggattgtttattgcttagaacttgataggcttttcgttgcgcggttttaatgaccatgacgatcacgaaaagaaccgggataagcgctaaactatacagcgttaaaactggatcaatcatcagcataaagccaagcgtaacaattacacttaaaatgtcggaaatcagattaatgagcccattggacaacaaatcactgagcatattgatgtaattaacgacacgaatcaagattttaccgtgcgggcgactgtcgaaataagagaaaggaagcttttgcaaatgaccgaaaatcgctgtccgcatatcttttaaaatgtcttgcccaattaacgtaattgatctaatgcggtatcgcatacaaagtccagttacaatgacggaaacaatgaaaataaccgcaatccagaatagttgtgtcatgtttttatttggaatcgtatcatcaatgactattttggttaaatacgggccaatcattgtcgctacatttgctaataagatgacaaagagcgtgatataaatagatttttgatatggttttacgtaaacgagaatacgttttaaatgtgcggcgctgaaggctgtttccagttcttcgtcaatatcaaatttatttctagccattcacattcgcctccgttccaagttgtttattgtaaatatcaaaataataacctttttctgctagcaaactggtgtgtgtacctcgttcgatgatttcgccatggtttaaaattaaaatttcatcggcttcttttacagaagaaattcggtgcgcgataataaaggttgtcgtattttccgtgattttttttaattcaccttggattttcacttcggtttccatatcgacagcggaagtggtatcatccaaaatcaaaatggatggattttttaaaagagcacgcgctaaagatatgcgctgcttttgccctccagaaagtccaacaccgcgttcgccgacaatcgtgtcataactttcaggcattgtttcaataaagtggtccgcgtccgcaattcgtgccatgcgccggacatcttccattgttgcatccggagcgccaaatgcaatatttccttcaatcgtatcagaaaacaggaaaatatcttgcattactgtggcaatatggtttctaagttcccgcacatgccattttcgcgcatcgacaccatcaattaaaatttcaccagaagtcggatcgtaaaaccggcaaattaagttgacgagtgttgattttcctgcaccagtttcacccagaatagcaatcgtttgtcctggagatgcttttagtgaaatatttttgagtacgtccgtgtttgggtcgtcctcgaaatgaaaactgacatttttgaactcgacgtgaccttgaagtgatggcgcaggtttttcagcgtggatggggattttagcgtcagtcaccatcatgtcttgaattttaaacgaagaagcgataaagcgttgaacgtcgttaattagccagccactcatccgcatcgggccgttcagcatccataggaatccattgaaggcaactaaatctccaagcgtcatttgtcctttaatgactaaatagcccccgaaaataagcgtgatgacaacgagcatacccgcgagcgaatcgagcactggcaaataggttctggaaacatcggcagaatctaaattacgttttttgaaatcctcattatgttcatggaatttcttcatttcaaaatcttctcgtgcgaaagcttttacgacgcgatttccgctaatattttcttccaccatcgaattaagtcgcgaaaaactttcccgaatttcataaaaaactggttgggctttgctagacattttcatcgttaaaacggcaataagtggcgttacgataacaagtgcaagcgttaatttccagtcaatcgtggccataataataatcgcaaaactaaacaaaaatacattttccaaaatattgtaagatacccacgaaacaaaatgacgaatcgcatccgtatcaccagtcatccgcgccataatatccccaacgcgcgtattattgaaaaagtcaaaatcgagtgattgcaactttttatacaagtcttcccgaattcggaacagggaattttgcccgattcgctcgcacataatctgataggtataacggcaaatagttcgaataattgtcgagataatcatgattaatagtaacgggataagcaaattcgttttattttgatagacaacatcatcaatcactttcccgccaagtaacggataaataatactaataccagaagcaataaaaattaaaataaatacaccaatcataagcaatcgatattttcggacgtattgccaaatccatttcatactctccattttttcacatcctttaatattcatatatccatttagtttacactcctaattttgaaaaagaatggtttatattcgctgtaagcatggacaatgttatataattaaaagatgaatgtaagcgttataattaggaggtgaagtgatgctgaaaataaatacgaccacatttaatccgcaaattttgtatatcgctaattgttatacgaatgaggtgcgcgtaggtgaaaatcaccatcatgattttttggaaatctcgattatttgtgagggaaacgttatttatgatattgaaggtgagcgagtcaagctaggaaaaggtgatatgctgatttttaatcctggcgtgagtcattatgatataaccgaaccaggtatgaccaatgcgcaactccatattggttttcggaactttgcactggaagggtacactcgaaatacgttcccgtttaaaaaggcctttttacgaaaaaaagaagaagaatctgccattttatctatttccaaacaaattatagaagaaaaagacgcaggaaaaccaggatatgacttgattttaaaggctttcgtcatgcaattaattatccatgttttacgcgaagccaccccagaacaacttgaaaataacggcgtcaaattatctaccgacgaacagcaaaaacagatacttgtaaacgaaattattcattatatggaaaaacaccatacagaagacgtctcgctctcaacgctttcgcaaacgatgtacattagccccgcctatatctccaaagtatttaaagaagaaaccggggaatcgccaattaactatctaatcaaaatccgccttactcgtgcagaagaattactgaagaataaagacgttagcgtaaaacaggctgcgaatatggtcggatacaatgatgcttattattttagcaagcttttcaaaaaatattacggattcccgccatccgaaaactggcgcaaatcgagttagaattgcaaaaaaaagacagagagaaggaagactagatggattatgaaaaagccttagcgtttataaaatcaaatagcacattagaacaagaagaaggaaccgaagttatttttaaacaggcacaagaaacagctcgagggaatttggatccttttttattaaaagacctgaaacaacatcttggcggtacgaatgatgcgataaaagaagcgccgcaagaaatccaaatgccagatttttctaatttggaaatagcaacggcagctgcactacaaatgcgagcaacaatgggaagtccgaatattgatttatcaaacggcgtaactacggagtatcgggttgttgaaggtgattatggcgatattccggtacgaatttatcgtcacgaggaagcaaccaaaccagttcccgcattcattttttatcatggtggtggctttgttggtggaacgccagctgtagtggagaatttttgtaaaggtatcgcggaaaagttaccggcagttgttattaatgtggactatcatttagctccagaattcccggcgccagcagctccaaaagattgttaccgggtgcttgaatgggtagtggaacaaagcaacgaacttggcatcgacgcttcgaaaataggtgtttccggagatagcgcgggcggaactttagcagcggcggtaagttatatggattatgaagcagagacaaattatgtaggatttcaagctttactttacccagcgctaactttagtagatgaagataatgataagtatcagtgggatatttccaagtttggggcatccgaagatacacttccgctcgttgcgccaggtatcattggaatgaacagctctggcgaattactgcggaaagcctatgttagagatgaaaatcccgcagcgccaatttattccccactatcggctgtagataaaagtatttatccgcctacacttatagccagtgcggagtttgacgcgttacgagcttttgcagatgtttttgctaaagaactgcgagcaagtggtgtacaaacaaaagcaatcgtttaccaaggaatgtgccatgcttttattgataaatacgggattttccctcaagcggaagacgtggcagatgaaattgttcaaatgatgaaagaaatattttaaagaataatttgcaggcatttttcgaaatgcctgtttatttttggactaaattttgcgattagtactaaaaatgtattagaatagagaggagaaatgagaagggatgatgggactcatgaaatttcagctttttattcaaccaaaattagatgttcttcagggaaatattgtcgaatatgaaatacttttacgtgatgatagtgcagttcctagatttcctctatcagaattagaagctgtgctcgcggacgaagaactgtacttagctttttccgagtggtttagcgaggctttcttagacgttttaaagaaatatccaaatgatcgatttgccataaatattgcgccacaacagcttttttacatagaaacactccactggctagacaaattaaaaagcgagagccatcgtataactgtagaaatgaccgaagatattttcgatgtacccggtcataaacgccaccttaatgcgaacgataaaaacgcatttattctaaataaaattaaagtgattcacggtctcggctaccatatcgccatagacgatgttagttgcggattgaacagcctagagcgagtgatgagctacctaccttacataatagagattaaattctccctcattcatttcaaaaatataccattagaagatttactattatttattaaggcttgggcaaattttgctcagaagaataagctcgattttgttgttgagggaattgaaacgaaagaaaccatgactctactagaaagtcatggcgtctcgatttttcaaggttatctggttaataagccgtttccggtttgaaaactatctacttgatcgagtagattctcgtgcgagctaatggtgatgggctttttggaaagcagtagtccgctttcccgtaattcttctaacacttcagttactctagctcgactcgaacgacaataatcagctaagaacgtttgcgtgacatagactggaagctcaattgagccttctgtttgatgcaaatgaagtagctcaataatttccaccaaaatacgcgttactttgactatgggtgcttgattaatattcttgtaattttttgatgtaaataaatatctaacaataacttcatcaagtataagatggaaaaattgtggatttgcatataaataattgagaagaaactcgcggtcaataaatagaacggtaccgttttctaatgcgcgaacacggtattcagtaagttcaggcgctgtttttgtttcgagtaaactttccattccaaaaagcgcgtgttgaccaatcaacgcatttatcatccagcggccttcatttgtaggaccttctaaaacagccgttccctctaaaatagcacctatttgcggcgccttttcttcgtaatctctatatgaatgaataatttctccttttttaaaagaaattttacttgaataatcactagaaaaaatatctgaaaaatctatcgtgtgaagcattatcaaaactcctatactaaggtaaaattggtatttaccatattactgtactgctatttgtgtcaaaaagataccgaataaaaatcgtgttcacaatttagacatgaaaaagtcactttttagcaacaattttagtgattttatcaataaaaacttactttttcttccctggagagatatccaaccaaaaaaagaccctccatagataggagagtctttcaaaacttcttgtaaacatcaatggaattgccaaaattaatgaaatatccaccataatcatacattggaccatatttttccgcgtaatgagaaactgtatggcgcaaaaattcttctgttacctctaaaaactccgctacttcaaaatattctcgtaagcctagataaaaacaagcaatgatgtcatcaagcggtattagttcctcataacctttgcgacgagcgaaaatttcttgttttttatccatgattgtttcctgtttggtgatattacctacagtgtatttgtaatgcatcaattcttctactaaaacacagcctttttcaatggaagattgatccttactaataaaaatcatcccatttaaataaagtcccggaagtttgtaaggcattttctcttctctgattgttacctcatcttggtatttatttaccaatttttcgtacaataaaatcacatcccgcgatggagttttttcttcatctctatataagctaaaatatcccgcatttcttcctcggttacgtcatcatcaatatgggctgcaattgttaccaagcgttcatcaacagggggtaaatttctttcaggaaaaaagtcatctaatcgtttgttgaagatttttgcaagttcaaataaaacatcttgatttgcttttcgatcgccattttcataacggctaatagtttggcgagttgtatgaagcttttctgctaatgcttcttgatttaagcctcgttcctcgcgatattgttttattttatttcctacaaatttatttagctccataataattgtcctccatatgtttatggcttcagtatagcacttttagcaccaaaacggaactttttcgaacatatttgtcggataaagtttaccagtaaccaaaatggtgctataatatttgtagagctagaaaataaatgtggctgattttgtaccgatagcaccaaattggtgacaaaactactatattaatttatgagatggaagtgggaatggatggatagaaaacttttaaaagaaaagcaaatccaactaatttttcaactagaacaagaagaaaatcgatttattcgaaagcgtttgatagaagagttggagttttttgaagcacttggggatagggaaaaaggacttctaacggcggagcaaaagttgcttattttaacacctagtgagtaccgagaatacaaaagaaccaaatcagatgtgcaaattagtaggataattggagtatcgagatcgtcacttgcagaatggaaacgaaaaaaaggtttaaatagaaaaaagtcgcaaccggttcagcaggaaatgattgatgtattagcttttcatttagataaaacaaaagaagaaattggcgctttacctgcttcggcgattgaatgtcagtatgaggcttttgtgattaatgaagccaataattaaggagtgataaaatgcaggttttagttttaccagaaaataaggatatcaattatataaaaacggtccaagaagtaaaacgattttttgcggattttgagcggtttcggatgattacggggttatcaaaaaagccacatttacttagaaatggttttctggaagagccgcagtttgagccggtagcattttctgctagacataataaagaagtcattttggaagcgcgatggttggtagagaaatatactgaaatgttgaatcagatggatgatttatatcgaactattttgatggaatgttacgtggaacgaaaacaagatgtggcggtaatgatggatttaccgtatgaaattgcccagtttaaacggataaaaaaacgggcagtgctagaacttgcaacgctaatggggattttagtaaggaaatgatgatactttcgtgatattttgaaacatcattttcctattaatatagaagtaagctaattgtccagtaagcggatgacaataaaagctgcatcagaatgaaggtgcaccgattttctgataatacatgatgttttacaaggaatttgtttttatgattggatttaaatccgttgagataaacaaatattctattttggaaagtaaagttcggaggaataaattattaaatgtggtcttgaccgaactttgctttctgttttaaaggagtgaacgtttggtgaagagtttgagcttcatgagagttttggaagcagtgagaacaatgctccaggaaaaaggcggactagatatttctattgtaatgcgtgaccaagtggaaatgcctacaacgatgatcgagatgattgatcaagaggaagaagaaagccaaactgcctggaaagaaaaataccgttttgcaatccatcattatacaaatgaaacggacttagcgggagtcgaaaagatagatacgcttatccaaacaggattcactttgcctgaaggatacaaattaatcgctgttcgacattacggaaaacaaaatttagtcaaagaaaatacgttaattcacgcaaaaaccagttttgaagtaagtatttgtcgtgaattaaaagtaaaaatttagggggaaatattaatggcatttgaagagaatttatattgtgattatacaccgggagctgctaaagcggtcgcggggaaagatgtaattttagcagtttttaacgcagcgggggacaaactattagcggttgcgggccaacaaggtctaactgtaaaccgttctaaagatagcattgaaattacatctaaagatacagttggcggatggaaatccaaaattggcggtatgaaagaatggtcaattgaaaatgacggattatatgtcgctgatgcagagtctcacaaagaattggcgaaatatttcgaaagtgatagcccggtttgtgtgaaaatcattaatcaagcatctaaaaaaggtcttttcggtggtttggcaattgtagctgactatagttttgaagcaccttttgacgaagcgatgacttactctgtaaaactagacggaatgggcgcgcttgttgatttaacgattactgagggcggcgaccaaatgcccggcgaaacacctgtagcaccagcagaataaaatagaaagccactgaaataagtggctttcccttaggaggaaaataaatgtttgaagtgaatgatacaacttatattttacgatttaataaacaaaaagttaaaacggtggaattaacatcagggattagtttagttgcagctttgactgcgaataaagggattttgagctatcaagtgattgaaacgctatttgtttcaggacttgtggaagaaaaaggcttagtacctgtaaaacaaaaagaagctttggagattttcgacaaattagtagaagaacaaggcttaatttcgcttaatgtagctgttattgagaaattgcaagaggatatgggttttttgttccgttaaaacagattgaatttgagtattttggtgctgaggacgaagaagtggatagtgaaatgaaccatgattttgatttggaaaaacagttcgctttttttgtagtcaattttcgaatgtccaagcatgattttgaagaacttactgaagtggagaaaaatttcatcatgaaagaatgggaaaacaaggtgatttttgaatctactatgcttcgaaatgcagttttaaatgcggaacaaaatctcaatcgaaaacgaaattcccgttttatcgacttgcataaaaaacgtcagaagaaagccgatgttaattatacagtaaatgcacttcaagcaatttccgagaatgaagcgaaggaaggtaaagcgtggattgatcggatttatggtgcaaatgggttgcgaagacctaagaataaagaagaaaggaggaacgtgaatggcggattctaaaagttttacatttgaactcaacgagagcgttttaacagcgcaagttggcaggctagatgaaatggcgatggttgtagagcaacgattttcagagctcaaaatgactattgaagatgttggaaatgctgatccaggttcgaaaatttccgagtctttaggtgggctgcagtctgggcttggcacgattagttcggcgtttggacagctgggttctagtagtgaggcgattacatctggattcggtactgcggttggttctgttggtggaatcacggatgcgtttaaaaatctaggttcaagtgtgcaaaatggtacgttattttcaagcttggcgactggaattggtggcatgagtacgatgcttggtggagtatctggcggcgttcaaggaattacaaatctagctagtggttttatggagttgaagaaccatttaggcggattaatgtcttctattggcggcgttggtggaattatgggtaaactgacctctcctatggggttagttattatcggtattgtagcgttagtagctgcatttgcgtatttgatgacgacgaatgaatcattccgaaatacggtgatgtcagtcgtaacacaggttgcgcaactgttcggtcaacttgtcgccagtttaatgccgattatcatgcaaattgttactgcggttatgcaaattggtgccgcgttaatgccaatggttatgcaatttattagcttttttgcgcaattgttagcccaattaatgccgtttattaatatgctgatttccatgcttatgcctgttattatgcagattgttcaagttgttatgtcgcttgtttcggcactattaccgagcatcatgacagtgattcaaggcattatgagcgttattcaatttttaattccaataatcatgcaaattgcgacggtggttgtacaaattgttgtaacgattatttcttatataagtaaaattatgccgattgtaatgacgattattggcgttattgtttcgattatcacaacgattattagttacgtcgttattattgcgacgacgattgctagtgttattgggaaaattattagctttattgcgagtgttattacggcggttatcgggattgtgcaaccaattattgcctttattaccaatatctttacgactatcgtgacaattattggtgcagctttccaaatggtatttactgttgcatccaaaatttggaattccattatgtcgactatttccggaattattgacggaatcaaagcagtcatcacaggtatttctactacagtttcatcagtgtttaacggagtgaagcgcattattacaggtgtttttgacggaatcaaaagtgcttggggtggtttaactgattttgtaggaaatattttcgatggtgtttcaagtgcaattcaaacagtggtagacaatgtcaaaggttttgtaaacgtggtaattcgagggattaatggagccattggtttaattaataagattccaggagttgaaatcggcaaaataccgcaattaatttccggaacaacaaatttccaaggtggctttgctcgaatgaatgaaggcggccgaggcgaaatggttgttttaccgtcgggttcgcaagtaattccgcacgatgcaacgatgaaatacgcaagagaaagtgcgcgcggaaataaatcaatgctttacacgagtcaaggcgctgatttggctagagttgaaaatcttctcgagcgcttactacaaaaaaatcctgtaatcaaaatggatgacaaagtggtagctgaggtagttagccgtaatcaagctaactcatttgatcagtacaactacacaatgggaggtgcagcttattcatgagtgacttgtttttagaattaaatggaaaagtgcattcgcttagtgagacatttccaggtctttctgtacaagaagtttcgagacaaagtccccagttaagcatggaaactgctgaaatagctgggactgatggggttatcccaggaatgacccaatttaaaccgtttatcttttcagcaaaatgtaatttgcaagcacttgatattccagattatcatttggcagtcagagaaatttatgaatttttattccagcgcgatagttattatatttggagcgatcaaatgccaggaattcggtatgaggtgcatcctaaaccagttgattttagtcgagaatcggatcgtgttggtttactcactatagaatttgatgtatttaaaggttatgcggagtcacgtggcacgagccttgaccctatgacttttgaagtggatttatggcaaatgggaatgaatttatcgaaccgtgatgatttattttatatttttaaagaaaatacatttcgggtctataatgcggggagcgaccgtgttaatccactgatgcggcatgaactagatattgcgatgacggcgaatgggacaccaacgattcataatcttacaacgggagaatccttcgagtatcagaaagagctccgaaaaacagatgttttactgttgaacaatatttatccacttgttaataaccgccgtgttggaaaagataccaatcatgggattatcacccttgaaaaaggctggaacgattttgaaatcaaaggtgtaacggatgtaacgattgcttttaattttccgttcatttatcggtaggtgatagatatggattatgtgattattcaaagtatggacaaagaagtggaagagattcttacagacatagattacggctccttttcctacgattatgaaaaaaatacaagtcgtgctatttcgtttactgtgaacaaaacgaaacagaatgcagcaatttttgacttggtaggaaatgaagcaattttaacatatcaagggcagcaatttgttattaaaaaatgtacgccaaaatctattggaggaacactttcaaagcagattacggcccagcatatttgttatacagtgcaagatcatgtgcagtataacgtgaaatctggacgaaaaaaatattcgattcaaacggtattggaatttgcgttacaagataatgtactaggattttcttatgaaattcaagggagttttcctttagttgaattagaggacttaggaaataaaaatggcttagagctagtgaatttatgtttggaagaattcggagcaattttatttgcagataataaaaagctttatttttacgatgaaaaaagctggtatgtaaagacagagaagcaatttcgttatttatataatacagaagaagtttcggtggatacgaacacagacaatttgaagacggagataaaatgttacggcaagcaaaaagagaatgccgataagctgactggagataataagtacatggcggttgtcacgtatacttcgccgaatgaggctatttacgggaaacgaatggcaaatgctaaaagtgatgataaaatcacgaacaatgatgacttattaatttttgcaaagaagcaaattctagatgttccagaaacagcgcttactatttcttacaaaggaaaagaacctgtttcagagcgggatgtttggtatttcattcatgaaccgatggggtttgaaacagaagtaaaagtaacgaaaattaaatcgagtcatccttggagtaagaagtttcaagaaattggcttcagtaattcgcgacgggatatggtccgaattcaaacacaaattgctaatcaagtgaaaaaagcgagcgtggatacaaataaaatcaattcgttttcgagcatcgcaatgaatgcttatgattcacgaattttaacggaagtagtaggtgtggtagatggcgactgaaattagagtgttaaaaaatgtagatgatacagttttctatccgaagacacatgtaacggctgtggaaggtttggactcggctacaactactacatctggattaatgccggccagcgacaaaacgaaattaaatggaatcgaagctaatgcagaaaaaaacaatgtgactgcaatcgatattgccaattggaataaaaaacaggacgcaattttggtttctgaaaatggttctaatttcaaaataactgtcacaaatgctggtgaactaaaggcaacaaaagtggaataggaaggaggttgcgtatgaagttggatttatggaaatgggaaatgcttcttcaaggtcgagaatttagaaataaaacaaatgacaactggcaaaaattgatggattggtccgattttatttcaacaggtttaagcgcgatttatgtctatgtaaataaagcggatgctaccttaaataacaaaattgataccgtggataaagcagtaaatgcaagggttaatgagctgattagcgggacagagcagctaagtgaagtggttgatgcgagatcagatgcgtttggtgcacgatatcctgtgctaagagaacgtttaaaccaagaacagcttaactttagcaaaaagagcacgattcaatttgatgcgagtactatcataagtatggaaaaacaagatattgggctgctaacaagtaaaaaaatctcagaagcgcaaaccgtatgttttttaaatatatcaagcctcgatgaagaagcagatattgttcttgaaaaaacaggtgagacaagcttctcagacaatttaacgagcctagtctttgcgaaaattggaacgaatgaacgctaccaaatggagccagttggtgcataaaggaggagtgagcgatgactgaaataaagcgaatgctacagacaaaagaagataattcaaaagaacaattttatccagagacgcatgttgcggggattgtcgggttgacagaatatgtgtcaggtcagcttccgacaggtgtggttagtgtgaatggtaaggcaggtcgcgtgttactggatgctgaagacgttcacgctgcaaaaaaaagccacacccatgaagtcgcaacatacactacggatggctttatgagttcttttgataaacaaaagattgatcaattagtttcaccggaagctggcgtgacaagcataaatggtaaaacagggattgttgatttattcgcatcggacttagatgcagcagagataaaccacacgcatgcagaagcaactactacagaaagcggttttttatcaatcgacgacaaagaaaaattagatgcgatacaagtaatcgcgctggaaactattaaggaggttatagaatgactaaaattgtaaaaatgtcagagaagaatgaacatggaactctagaacaattctatccagaaacacatgcagaggctgttaaaggacttgtgtcggtttcagaggaagagaaaacaatttgggatcaaaaggaaagtacggcgggtgcagagcaaaaagcaaacacagccttaaatagtgctaaagattatgtggatacgataggtgaaggaacggtgatttttaaaggcgctaaccttatgggagctggccaatcatttaaatgggacgcttctaaactgaaatttgggatgactttgttatttagtcgctatgatgcggcaaataatacaccgcaagattattattatcattctgtattcttatctaaggcacaattagttgagcttgcaggaaaaggtattttagttcaaatgccatcaacgacttatggagatcgaaaatatctgtatgtttcaacaactgggttatctggacattttgataattcgaattatgcggcttgggctcttcgccaagtaacaattatgtaactaaaaaggaggttttccatggaagtcatactaaaattcgggattttaggttttggcgcgatatttggatacttgtttggggaagtggatttattggtaaaagtgctggtgtgctttattgtagctgactatatttctgggctactcgcttcagggtatcttggggaacttagcagcaaaatgggtttcaaaggaatcgcgaaaaaaatcgctatcttaattttagtggctattgcgcatcaaatagatttgattctgggaacgcataatacaacgcgggatgcggttatctttttctatttagcgaatgagctgatttctatcttggaaaatttcgttcgaatgggaatgaaggtcccggaagtattgaaaaatttaattttgattttcgatgcaaagtcaggagaggatgaggaaaaacatgacaaagatatggattgacgctggacacggtggtaaggattcaggtgcgagtggtaatggacttgttgaaaaaaattgggtactaactgtagcaaaacaacttcaaacagagttagttaaagccggttttgaagtgggaatgacaagaacaaatgatacattctatgaattaagtgatcgtgcgaagaaggcgaatagttttaaagctgatttatttatttcgcttcattttaatgctggtggcggtaaaggatatgaagattatatttacacatccgtcccggctgcaacggtagaaatacagaaaataattcataaaaatattattactaaagttactaaacacggaatgaatgatcgtggaatgaagaaagctaatttcgctgtattaagagaaacagcaatggatgctatcttacttgaagctggattttgcgatagcactgatgcattaattcttgagaagaaagcttatcaaactgattattgtttaggaattgtatcagcagtacaagagatttttggggctatggtaacaaaatatagggcaggcaaatatttgacaagtgacgatgctatatcaggcacaaatattaaaggatatttagaagcaggaacaaaggtttttgtttataaagaaacagaaaaaacgcttaatttaactactacaaagggtgttccaggaagctgggttttaaaaacagaagttaatacaggaaaaagataaaaaaaggagcggccaatttggctgctcctttttctcaattaacttctcttccgcaaaacataaagcgcagtagttgttaaaataacaccaaatacagttgccaatccagctgtatcaccagttgttggtaaggaagtattggaagaagttcctgttgttgatgtgtttgatgtcgtagttgtaggatcttcggtagtagtagttccgccgtttgtgccggatccgttaccgttgtttgttccaccattaccatccgttcctccgttatttccgtttccattaccattgtccgtgccgccgtttccattatctggaggagtcgttgccgcagcttgaaccgttgcttggaaagtggtgctgtatccgttcgggtcagtgatagttgttgtgatttggtcgccttttttaaggtttaaagatgttacatctacggaaaacttgccatttgcgtcagctgttgcgttaggtccggcagcaagcgccattcttgcgttagcagttgccttttgaacggaaactgtagctcctggtaaagtagttccagttagagttttgtctttttcggctagtttgttgatttttgttgcttctttgatggctttgatagctgcatctttggtttctttgtcgatttcagcttgggatttgtagactttacgtccttctttttgagctgtaatgacttttccagcagctttttggtctttgatgtagttgatgaatgtttcagtatctgggtcgattgcagttactagatttgcttttttgaaggctgagaatccgtcgccgccgccaaataggaagtcattgattacgactttgtatttttggtcagtttttaaaggagttccgtcttctgttgtaacgctcgcaactttgtacgcgtgatccaagtcatctgtatctgtgaaagtgtattttagtccagaaatttgtaggaagtaagtttggttgcttaaatattgttggtttagagcttccaaaatatcagcaccagtcatttcgactacttgaagaatgttaccaaatggttgaacagcttgagccgcgccccatgtgatttcgttttggccatttgcaagacgagtagtaaggtcagaacgaattccgccgttgttagtcatagcaaagtcgacatcggcgccggctttatttgccatgtaacgttgcgcatccgtaatcatattaccaagctctgattctttatcatcaattgctttgttatctggattggtgtcacgagaaataacgtctttattcgctagtccgatagtttcgttgataaccccttcaatgcggcttttcgcatcttcagttactgctgtaatatcggcatttggtgtgacgcttctcgtgttgtatgtaattttagcgtcaggtggtgaaacgaaatcgccagttgttttatcgagttcgccagttacatctgaaaaagctttaccattgttgtaactttggacgatacgagtttttccaactaatccatttgtgtattggtgattgtgaccagcaaggactaaatcgaccgagttatttgggtctaattcgtttgcttttgtcatcatattggcagcttcgccagctacatcttgttttgttccagtatttggatttccagtagaaagtgcgggaacgtgagataaaacaacgattgcgttaacgccttggcctctaagttcagcagagtatttgacgattgtttctgcttcgtcaaggaaatcgtagtctttaatatgattcgcaagaactaagttaggaatttctgttgtaacgataccgatgaagccaactttgacgccatcaatttcttttacatagtatggtaaaaagccttctgcgactgtgtttgttcctttgttgacaacgttagctgcgacgattttcatgtcacttttaacgcgtggataagcttctacgattggtccgaatttgtttgtagaaactccgtccaaaattcgtttgtattctggtaatccttcatcaaactcatggttacctaatgtgccgacttcgaaattcattttttggagaactttcatcgttggctcgtcttgaagtaaacctgatactgctggacttgcgccgaccatgtcgcccgcttgaacacggatagcattgtcagttgtcgccccaggatttgcctgtaaaaatgagttagtggcattgtccaaattggtagctaagtaatctgctccgccaattggtgagcctgatgcatctttagaggctgtttcaagcgctccgtggaaatcatttattcccaaaatctgaatgggaacggtatccgctgctgcttgtgctgttgtcccggtgaatggtgctgtaagtccgattgtgagccctgctacgagtaaaacatgtgtagttttcttgaaaaatttgttcactttcacactctcccttttttcgccagtggcaattttgtaagcgctaactcataggtgcctagctataattgtagcaaagtggaatcaccctagcaataggaaatatggattttgtgtaaatgtaatgataaaatttggctatattttcatttcgatggaaaaaagggtaaactagagaaaaaggagggataagatggatatctcgagcacggaaatatgggatgcgattaggagaaatagttacttactttattatcaaccaaaagtagacgcgaaaacaaataaaatcatcggttttgaaggtttagttcgactaaaaactgcgacgactattctagctccaattgatttctttgatgatattgtccttttaaatgcaacgagggaaatgcaagattttgttgctgaaacagcgataaagcaaattaaccagttaggtggacgtttttctatttctattaacattccggcgcattatgtagcaagcagcacgtatatgacttttttacatgattatgtgaaagaacatttaaagtatccagaatgcctagaaatagagattatcgaacggggggaaataacggaacttgctatcgcggataaaaacttacgaaaaataaaagaccttggtgtcaaagtgagtatggatgattttggaaaaggttatagctcgcttgcgtatttgcgtagcttaccgattgatattgtgaaaacagatatgtcatttatcgcgcttttaaaaacagatcgaaaacaacaaattattattcgcgcaattgtcaatttgtgtcatgatttaggcgggaaagtagttacagaaggtgtagaagacatggagcaagtggaaaaattacgggaaatgaaagtggactatttccaaggttattattttagccgtccgctcccaatggaagaaattaaacaaaagtattccattgtatgagccggataaatagaaaaaattggttggtgtgagaatggtaatttaccaaattcacaccaaccaattttattttatttgattaaattgttcgaagcatctttcacaacaacgtcatgtgcgccgccttctacgatagaagtggatgaaacgagtgtaatttttgctttttgttgtaattcagggatattgagcgcgccgcagttacacattgtagagcggactttgctaaggctgattgcaacattgtctttcaaagatccagcgtaaggaacataagaatctacgccttcttcaaaagataatttcttgtcgcctccaaggtcataacgttgccagttgcgcgcgcggttagctccttcgccccaatattctttcatatacgtaccatttaaattcactttgttagtagggctttcgtcaaaacgggagaagtaacggccaagcatgatgaagtccgcacccattgctagagctagcgtcatatggtagtcgtacacaattccaccatcagaacaaatcggaatatacacaccagtttcttcaaaatattcatcgcgggctttagcaacgtcaattaaggcagttgcttggccgcggccgatgcctttttgttcacgcgtgatacagattgaaccaccaccaacaccgactttaacgaaatcagcaccagcttcggcaagataacggaaaccatcgcggtcaacaacatttcctgcgccaactttgacagtatcgccgtatttgccgcgaacgtaatcaagtgtgcgtttttgccattcggagtagccttccgaggaatcaatacacagaatatctgcgccagcttctacaagagcgggaacacgttcttcatagtcgcgcgtgttaataccagctccaacaacgtaacgtttcgaggaatcaagtagttctaatttgttttctttattagagtcatagtctttgcggaacaccatatgaaccaagtgctcgttatcgtctacaagtggtagggcatttaatttgttgtcccaaataatgttgttagcttcttttaaagtggtcgatttgttagcagtaactaatttttcgaaaggagtcatgaaatctgctactttttcatcagggctcatgcgcgttacgcggtagtcgcgacttgtcacgattcctagtaatttaccgtgcgctgtgccgtcttctgtaactgccactgtagaatgacccgttttttcttttaaatcaaggatgtcttgaagtgttttgtcagggctgatgttggaatcactaataacgaaaccagctttatgatttttcacgcgagaaaccattgctgcttcactttcgatggactgggagccgaaaatgaaagatacgccaccttctgtagcaagagcgatccccatattatcatcggaaacagcttgcataattgcggaaacaagcggaatgttcattgtgattgcagattcttcaccctttttaaattttacgattggtgtttttaagctaacatttgttggaacacattcagcggatgagtagcctggaacaagtaaaaattcactaaatgtgcgggacggttcttcaaaataaaatgccattatttccactccttcttctatttttaaatgaatttataaaatatctttattatttcaataactggcaggaaagtcaatgattgggggagcttttttaggaatgtttctggacgttttcttttggttgatgagtggaatagatggaaggtagagaaactttggcgaaggaggtaatcagatggacgaggaaacgctgcttgagcgaggctaccgtaagtatcgcggggcggatgtagatatttattttaatacaaatgtttgcgagcattcgggtaattgtgtaaaaggtaacgtagaactgtttaatttggaccgaaaaccgtggattatgccggataatgtatcgaaagaagaggcgaagcgggtgattcatacttgcccaagtggagcacttcaatatatcgagaaataggaggagattaaatggaatataaaaatggtgaaaatagaatttatgctgtaaatgatgaaggagtagaggttggcgaagtgacttttgtgccaactggggaagatatgtttattattgaccatactggcgtggatgatgcggctcgtggtcaaggaatagcccaagaactcgtgaaacgtgcggttgaaaaagcaaaatcagaagggaagaaaattgttccgctttgtccatttgcaaaagctgagttttctaagaagccggaatatcaagaagtagaagcatctaaataacaagcgtagactgggttttctgcccggtctatttttttataaaataatttttgggatttcagttttctcttcttgacatctgctttgtttcagtgtatctttaattcacagtaaacttataggaataatagtattacgttttcttatcaagagtggtggagggaatcggcccagtgaaacccagcagcggagcgcaagttctatgctaattccgatcagaagtaatattctggcagataagtagtagctttcaatgaggtgcttcgattctgaccaaaaaacagaggaagcgttatttttttagcgcttaaagaggggagtttttgttagatgaagaaatttttattagtagcggttatctcggtttttgccttggtgttaacggcttgcggaggttctggcgctagttcagacaaagcaaacggttcaggcaaagcgaaagacggcggctctcttattatcggagttacaggagatccagaagttatcaatccgaactacgcttctgaccgtgtaacattaacgattcaacaagctgtatacgcaccgctattttgggaagttgacgggaaaccggcacttgcaaaaagcttagatatttcagatgacaacttaacttacactgtgaaactaaaagatggtttaacttggcacgacggcaaacctttaactgcagacgatgtagtatttactgtaaattctattttagatacaaaacaaaacagtccgaaccgcggcaactttgtttttgacgataaacctgtaaaagtagaagcagtagacgacacaacggtgaaattcactttaccaactgttgctccagcctttgaaaatacaattaaaactttcttcccaattccaaaacacatttttgaaggggtagaaaacatcgagaaaagtgataaaaacaaaaatccaatcggctcaggtccgtacaaatttgttgaatacaaaacaggcgaatacgtttccttagaaagattcaacgactactttgacggcaaaccaaaattggataaagttactttccgaatcacaaaagaccaaaacgcagctaatttagccctgcaaaatggtgaaatcaacttaaaatccattcaaccttctgatagaaacaaagtagagaaagcgagcgcggtaaacattatcacttacccagaaaatcgcttaagctatgcgacattcaacgaaaaccaaccagcacttaaatcaaaagaacttcgccaagccctttcttatgcgcttgaccgtgaagaaatcattgatgcggcttacggttcagatgaatacgcaaaaccagcttcctcgttcctgacagaaaacacaaaatacttcacggataaagtagaaacatacgatcaagacattgccaaagcgaaaaaattagtaaaagaaagtggttttgatacaagtcaaaaactaactgtttactatttaaacaacagtaaatcacaagaaagtatcgcgctttacttgcaacaacaatacaaagaaatcggcgtgacacttgacttgaaaccaacagatccaaatgcactaagcaacatcacacttgaccgtaaaaacgcagactactctatcgcactaaatggttatatcatggggaacgatcctgatgcgtataaatccctatacctaagcgatgcgccatacaactactcgaactaccacaacaaagatctagatgcactttgggaaaaaggtgctgtaacagctgacgacaaagaacgtcaagaaatctatgaaaaaatccaaaacacaattgctgatgacgctgtaatttatccaatttcttatgataatgcagtgctagctcttgatagccgttacggtggacaaaaagctgcaacaccacaaccagtaacaatgttccgtgatctttctaaattatatttaacggaataataattaaaaatcattcgtgaaaaatctggcctgccatgcttgtttttggcaggttcagatttttacttgtcatttttagtgttttagataggagataaattatgctaaaaacaatcataaaacgcgtattgcaaattattccgatgctatttattatctcgattatttcgtttgcccttatcaaattagcacccggggatcccgtgaattcctttgttacgcctgatatgaatcctgacgatgtagagcggattagacaaagcttagggctggatcaaccaatttatgtacaatattttatttggcttggaaacttgttgcaagggaatcttggttattcgattgtgaatagccagccagttttgcaacaaattttagagagaattccggcgacacttggtttggtgggaacttcgcttgttctgacgctattattatcgattccacttggtttagttgcggcgaattatgaaaatacgtggattgataaagtgttaaacgggatttcttatatagggatttcgattccgattttttggtttgggatgattttaatagatgtattttcaattcagctaggttggcttccgagtttaggaatgcgaacgattggggtcgactctttttgggatatggcggagcatgcaattttgccggttataactctgactttccaagggtgcgcggcatactatcgctacgtccgctcgaataccatcaaccaattaaaagaagaatatgttttgtttggttatgcgaaaggtctatccaaagtgcaaattatggggcatcatgtcttgaaaaattccttgctaccagttataacactacttgggatgtcacttccgcaagtcattacaggcgcttttattaccgaaagtattttttcatggccgggcatgggctcgcttggaattaatgcgatttttcaactagattatccggttattatggcgattacgctattttcagcgctgttattaattatcggaaacttgctggccgatttagcttatatgattgtcgatccgcggattagggaaatggggtgaggaattcatgatgcgattagatttttcgaaaaaaacaatgcaagatttcgagcgggatgcagaagtcgttcacgcaacacgagagcggagtttttggcgctttatgcttgctgaccgccgcgctgtttttgcgacgagtgtgctgatacttattacggtggcttgtatttttgcgttcctttcgccttatgaccctaatgctctttccgttcaggacaaactgatgccgccaaattcgtcgcactggtttgggacggatgaccatggtcgggattacttgacgcgtgtcttgtacggtggccgggtttcgctacttgtcggtgtgtttgcgatgatgattgccgttgtcgttggaacgctcgctgggacagttagtggctactttggtggcttcattgacaatatagtgatgcgttttcttgacattttcatgtcgattccgtcatttttcctactaatgattttaaatgcatacttaaaaccgggaatttcgaacattattatcattatcggattgctttcttggatggaagtggcgcggatagttcgagcggagacgttaacattaaaagaacgtgaattcattttatactccaagtcatcaggtggcggatttttccacatcatgttcaagcacattattccaaacgcgatgccatcgattgttgttgcagcttcattaaacgtcgctacagccattttaaccgagtcagcactaagtttccttggcctcggcgttcaacagcctaacgcttcgtggggcagcatgctgaacaatgcgcaaggttacgtcggcgaagcaacttacttggcgcttttccccggattattaattttaatgacgattctttcatttaacgtacttggcgacgtgctgagaaaaggtttgtcacgtagatattaaatttgaaagcactttgatttttagtcaaagtgtttttttgttttttaaagaaaatgtacttaaaatagaagcgtaaaaaacgtgtttcagccaattttcaaaggataaattcacaaaacgctcacaaaataagaatgcgtgcgatgctataattaagggataaggtttcattattatagacagagatgaggcgcagaaatgagtgaaataaaagttaaagaagcaacattagcaaagtacgcaacaaagttagagtctaaagggaaatcaaccgaatatttaccgatgaaaggtggcaatatgtcctatagccaagccaattccatcaaccattttcgaacagcactgtttgatttggtagacgcggtggacaattttcaaggtgtggtaggaacggatgccaaaagattgaaagaattaggcgcatcatttactcgcaaagaccaagagcttgaacggagcatgggattggggggtaaataaatggatgcaaagagccagcaagcggaggcgcaattgcaactgctgaaaaaagaacaatccgcggccaaagattttttgcaagatttgcaacgacaacaaaatgaacaagagtggttagcggaagatgttgcacgtgttcaccaagaagagcgggagtcgctggagcttttgcgcgaagtttggcaaggcgcagaatcaagaagtttcggctactatttggcagatctacaggaagaagaaaaacagaagtggcataaaaaaatccaagcaaatgaagaggaatgccaacaaaaaatcaccgcttgccgaaaaaacatctaccaattagaaaatcaacaacaagatttacaaaaggagttgttacagtgagccgaattgacatcggagaaatacaaacctttgcgtatcaactacatacagccaatgaagcagcgagaaaaagcattaaagacatcaaaaatgccgtgaaaaactataccgaagatggcagtttaaagggaaaagcgattgacgcgtcaaaaaattattaccaaatgacctattttcctttgtgtgatgcgataatcgaagccatgaacgaaagcgaagaaagattagcgcaatatatagctgattttcacgcccaagtggatagttcggctgatgcgagaattgatgcggacggcttatacgaactcgggaaaatgattgatcgcatcgaagctaaaaaagaagcgctggcccagcggatgaatactggaacggaaggacagatgcagagctaccgttcccagctaagtatcgcctacaaacaagaaaatattttagaaaaatacttggcttttgaacaaagtcatggcggcttttttgataatttaacggatctagtccgaggaattcagcaaaccattcgcgaactccagtcgaacattcaatttaacagtaaaacgggcacctatgatatgagcaagctgaatttcaccaccgtgacccggatgcaaaacgcctcaggaaaagcattaaacgacaacgcaaaaacattcaattttgacgaatatcaaaaaacgtatcgtggtcaaatgtgggtgttaatgaaaaatggtatagtagacgtagaagcaacgaacgcgtacaatgccgccgtgctcggtggggaaatgccgcatgaaagcaatgaagcgcaagaagaagctgagttgttacaggcagttgttcaatcggtaaaagaaggaactgacccggttactggacaagagataagtaaagcgcaaggatttggtattataagtggtcttattttccgctatactgctggaggttataaagggaagaagttcaagattcctagggattggttacacagaaggaagaaaaataatggcgtagaagttggaacggactttgggaagataggtaaattagttaatcatcctaatattaaaataaattggtctgaatacgccgaacatggaatgtctagattgaaacaacgtggtctttccaagagtcaagttgacgattttgtggagcatggaaaagttttatcccaaaatgaaggagaaaaatttgcttttataacagaagacggtgttgcaattgtcagcaaagatggcaaattagttactgcttggggtaaaaaagattttgatgaaggaatgaaaaaaataataggaaaattgtatggaaagtagggtgtcattatgtatgaaaaagtagaaaaaataataaatgattgggatccaatagagctgtttcccttagctccaaaagatgaatatagtcaagaaatcaacaaaataattagtattgttcaagaaaatcctaacattgatatgaatgtattaggtaaaggtataagaaaaattttcatagattcgtttggagaaaatttaatatttaaaaataacgaagatgaaatagctgaaaaaattttagcgctataatttttgataataattaggattttgctataactggttagaacttactatctgttttaaactatgaaaaataaatttaacactagaacaagataaaaggaatgaattaaatgattaatagtaggttttatgaaggttttgaaggagaagcagagctttccttcgttgctggtgataataaacttttaatttggaacggttattttgagactattttagataacttattagattgtaatgtagaaagagagggagttctgaaagaatattttaatcatgagggatggtatgatgattcaccgtggatgattgaagataactctcttaccattattcaattaaaatgttttgatattaacaaaatcaatcagacttccatgaaagatgatttagaggaagtagttaaaacaattatttcatttttggaaaataatcgatttagtaaaatctatattgaatacgaataataataaaagatattctaccactaaattgggcaatagaattgaatgggaaaaagcaatatctgctaagaaaaggtgaagtatgctagaacaagataaaatgttaacagatggacattgtgaaggataggaaaggttggaagataaaatatggataattgttataaaggtttcgaaggatatccagaaattgattcttatacttacataggtgataaaaaataggtatataaaggcgggaaaatacaatagacttaaaagaaaacatgaatattgtgctgtctgaaagaaaaaaattacatatgaatgatgattatggtattgaaaaatgtttgagtaaaatgacagcacttttgtctagggatgaggataccacaatgaaatatttagaaaattgcgatgcggataatttatattggataagtgaaatctttgaagatatttctgccaatttgaaaagtcaaaagtttattgattacttgagaaaactggataagaaatttccagagttagaaatgacgcaagatattgatattgctgaaagttatttttaaagatacatctgtaattattgatgataaaataaattgttcaaatcagtgataagtttgataaaaattgggctccctatgcaggaatagttgattcttataaacataaatgagggaaataataagatggaagaacaagagatcattgaaaaagtagaaatcttaccaaataattttagtgaaaatgacagtatttatatatcacaagaaaacattaaaaatttggttttattttcaaaagaaaatcaaacagttttagaattgttgattactccttttctaatttgtgtaaatagtgggttaaaatatgagttacattattatgaaatttcaacagaaattagtaaaaatgatacagaaatcataggttttccttttggaaataagctaccaaaagaaattacagataatatttctcctaaactttttgtaagaagagaagattattcagcttttgagaattttttaagtcagtattttaatgcaatgaagagcatgggatttgcagatgataaacaggctataggtatgattgaacatggtgcaaccttattctacgaagtattataattttagattctaaagagctagtattgtcattaaatggtcagagataatgaattcattatctctgaccatttttgaaatatatctttaaaactttttagcaacagaaaggataataaatttcgtacataaaaacgataaactttcccgccccaagaaagccagttgagctgatatagcggctgatgtagctaaaagtaaaggcggcgttactttagaatcaacaataggaaataaaaatattgaaatgccagactgggattttaataatcctgagtcaatgaaagcatgggatttggcttctggttcttatgcagaacaagtttctgggtgaagttcgtgcagtagttggttcagatttgagaaaagtaaatatttggggaaatgctgagtaacctagattaaaaaataatcctaacgtaacgaaaataacaacgattgttcctaaaacaggacttgaaaaaatttttttgaaaggaagtaagtgaaataaaaattacaggtagtagttcacatgtgaaatttgatttagagaatggatatgtagtgaaagcagatggagaaatgttagttggaggtaaatttgttgtatttaaagattctatgaagaattgggaacctccatatgaaaataaaaagctttctgaatctgaagtgcaagaaattattcaacaggtaaaacagagcacaaatgaaaatacagtacaaatttcatttgaataaaagaaatgcgagaagtggagtaggtttgaaagaacaaattcaaatatcaatgcaaacggtgggcatgttatgctgaaaaggctcgagggacaagtcaaggtactagctatttcgtgagttcctcgggcaaaggaaaagacgttcaaaacaagtcacagggcaacagaaaatggtattctacgttgtattttctagcaatacaacaaatttatcatacgaataagggagaacctagaaatccagtgtttcgggtttatttcgagcggaaagtttcagatgctcatattccatataaaaggagtataattttgaaaataaaaaaaatattaccacaaacaataaaaagtgaagtttattttatagatgaaattaaaaattttgatattgtaactgaaaaaatgaatgacaatttctacacctacagattaggaagtaacgttatgatgtggttgaatgatgaaggggtaatcggggagatagagtgcattttccccgcacaaatagataatttaatcaccttatgggaagaaaaaaatactgtagtacaaaatggatttccgatgattgatactgatattgttgagaacaaaacttttattccaaaagtaagaatttttaaccatggtgattattttatactatatttcagtaatatgtataaatacaataaagaaattatttctgaaaaccttactttttatgcgaaggatacagaattaattgcaattaaagcggaattaacctgatgttgaaaaattattatacaggtttcgaaggatatccagaaattgacttttatacttatataaatggtgaaaaaacaggtatagaaatgtgggaaggctactttgacaatattatgaatgaatttagtccagttgatggtagatgggtttctttagcatattattatcatttatatgaaggttggtatgatgaaagcccttgggtgattccagacaacaaaaaagccttggaacaatttggaacaatcgatataaaagtattggataatgttacacaagagattatgatgaaactaattaagttattaaaagataacttagatagcgaaatttttatagagtattcttaataaaacaaagggcacctttagaatatataaaggtgccctttgttttattcaatattttttgacatttaaagttaactcattccaatcattctccataccgtggtcaaatgtgggtgttaatgaaaaatggtatagtagatgtagaagcaacgaacgcgtataatgctgccgtgctcggcgggaaaatgccgcatgaaagcaatgaagcgcaggaagaagctgagttgttacaggcagttgttcaatcggtgaaagaaggaacagacccggttactgggcaagagataagtaaggcgcaagggtttagtattataagtggcgttatcttttactacgctggtggtgggtataaagggaagaagattaagattcctaagaagtggttggatagaagaaggaatgtcaatagaattgattttctgcagagtgttaatattaaagactttgtagttaaagacaagcatttacgtaattctacggcaaagcgtgcaagaaagtttgatgcagaaacctcagaagaggctaatttgatagtacaagatgcattgaaaaatggtaaagtcaaaaaaattgaagataatggcctaggaagtcaaaggcaaaaatcttattctgcaataatagatacggaaaaaaatgttggaacaaaaggcgagtcgcatattaaaattgtatatgatgaattaaataatgtgtggactgtatatccagttccggcaccatgaagaaggtggagattaatatgaataatatagatagtattatgtctaaatacaacaaacaacaagttagtaaaattaaagattttctattatctgaaatagattcagacaatatagaagaaaccattgattttgtaaaaagtaacaatcaagagaaaatgggtaaatttcaagatattctgtatgatggtggaatttattcaggtttatttatagaaggaaatcaatatttgatttctagttctaatcgtaaagtcttaataattgacgcagttagcgaagaaaatggagtggataaagagcttactcgaatagaatgttcgcttgaagactttacttttttactgaggaatataaaagatgtcctgagatatgaggagttttagacttagaatcaatgaacacgtataatgcagccctcttagctcgagattatcgcagaagtgctagtgtctaatattttgagtggcatattctttactgatgattatggaggtatacaaaattggatcaaaaaataaaggatatctatcatatagatgactctttttctattgataatgaaaaatacaataagtggctaaaatcattgttgaataaaactagaggcgaaattactgaaaatgatgtatatacgatgcttttgcaacaagaactagaggatttagctatagaaaaagcgattgaattcattaaaatagacccattagctggagaaatgtgggatggacaatttttagaacagctagcaggaatctcggtcgataaattggtagcttacaaagaggagttgcaaaaattaataccttatatggataatcaaattaacgaaatcttgtgggattttgaaactgaaaaagaggaattcctatttagatatgcgaagtttaaagataaagtagctaatttatgaaaagaaataaaaacccagcaattacataattgctgggtttttccaaactgctaatcagtcctctatttctccacccgaataaacttataactataaggcgaaccaaaagcatgtttctgcacgcccgtaatatccgtacgttgcaacactgctgtttgatgttgataaagtggtaaaatcgccgcgtcatcatcaagcagaactttctcggaagctacaaaagcattccaacgttcttctggcttcgtcgcaagtgttgtatccgtcgattttacaagcttatcataagcgggactgttgtagctcatatggttattaaagtaatcagataagaataaactactatacgtccacggatccttaaagtcaggcatccaagcagccagtgacaagtcataattaccatcagaagttagctgtgtcgcgctcttcgaaggcatatttttcactttaatcgtcacacctggcaaattatcttcaaactgcgctttcaaataagcgaaaatggttttcgttgtttcttggtcatcgccgagcagttcgattgttactttgtcagtgccaagttctttttgtgcttgtttccagtattttaaagcttcttctttgttataaactaaatggttgccgctatctgtgcggaaatcagcgcccgttgttggattttggacgaaatcttttggcagaagtccgttcgctgggaaggaaccatcgccgagaattcggtctgttaattgcttcttatcgacagctaaattaagcgcgtgacgcaaggaattattcgctagcggagttgctttaccgtcacgtttttggttcatgcgcaaataacttatcagcgcatctttttccgtttggaaatctttcttgtctttgtattgtttcgcaaaatcgcctgaaagtggcacgcggtcagcttcgtttgtattataaaggttcacgccggcattaatatctttcgcgacttgcacatcaatttcatttactttgacattatctttgtcccaatattggtcgtttttcgcgtaagtccatttattcgtaatgttgccgccccaatccttcatgacaaaagggccattgtataaagtatgcgcactatctgtcccgtatttgtcgccttgttttttcacataactttctttttgtgggaaaaatgtttcaaaagaaagaagtgaaatgaagtatggaactggtttttttagtgtgatttcaagcgttgttgggtccgttgcaacgacaccaaggtcagttacaggtagtttgccttcattgatttcagtggcgtttttaatcgaatctttgaagagagcggagtacccaggtgcggtttttggatcaacggcacggcgccacgcgtagacgaaatcatcggcagttacttgggaaccatcggaccatttcgcgtttttctttaatttaatggtatatttcgtttggtcagtgctgatttctggcattccgtcagcaaccccaggaacaaagttatctttttgatcaagtgtgtataatccctcgaagacttggttttgcgcggtgaagctagcaaagtcttcctcagctgtcgtatttaaagtcagtaattcactggtttcaagaaatttaattttgtccggggaagtttttgtcgtagatttttcattgtcatttccgcaagctgtgagtaaaagtactgtcaaaatggcaaaaataggcaatgttttctttaaaaaatgcatggttttctccccttctatctgtgtatttatcgttattataagtattccgataagataagtcaagttaatgatttggcaaaaaaactgcttgacgcaaaaataatcccgtgataagatattttgtgcaaataagaattattacgttttgcgatgcgcgatcataatttacatagtgtaactttaagttttaaatcgtaatcattacgaaaaaggagaggtaatatgaaaaaatggtcatttttagttgtaacagtgttggcgttcgttttagttttggccggatgcggtgctagcaacgataaagtaagtggagataaggacaagctcaaggtagtgacaactttttatccaatgtacgattttaccaaaaatgttgcgggggataatgcttcgattgaaatgttgattgatgctgggacagaaccgcatgattacgaaccaagcgcaaaggatattgccaaaatcgaagcggcggatgttttcgtttataacagtgaagacatggaaacttgggtgccgagcgtacttaaaagcttagattcgaaaaaattaaccgtgattgatgcgagtaaaggaatcgagctagtagaaggaaccgaagaagaagaccatgatcatgagcacgaagaagggcaccaccatgaacacgatcctcacgtatggctaagcccagtccttgccgaacaagaagtgactaatatccagaacggtcttacaaaagcagataaaacaaatgcagatacatacaaaaagaacgcagaaacatataaagagaaattaaaaacactcgacaacaaatttaaaacagcttttgaaggagcaaaacaacgcgatttcgtaacccaacatgcagcattccaatatttagcaaaagaatatgacttgcatcaagtggcaatcgccggcctttcacctgaccaagaaccaagtccagcacgattagcagaactacaaaaatacgtgaaagaaaacaacattagcaccatttattttgaagaagtagcttcaccgaaagtcgcagaaacacttgcaaacgaaaccggtgcaaaattagaagtattaagccctatcgaaggaattaccgataaagaacagaaaaaaggcatggattatatagcttatatggaacaaaatcttcaagccttgcaaaaaacaataaaataaggaagcgatcaaatgaaatacatcgatatagccaatattggttttaaatacgaatcagagccagtgcttgaaaacatttcttttcaagtgagtgcgggagaatttattatactaacaggagaaaacggagcagctaaatcaacactgctccgtattattttgggcattttacaacccgataaaggttccgtgactttcgccaaaaagaacgcagatggcgggcgacttttgacaggttatgtaccgcaacaaatagcttcatttaatgctggttttccaagtacagttctcgaattagtaaggtcaggacgttttccgaatggtaaatggttcaaacggctgactacaaaagatcatgcgcatgttgaaaaagcattaaagtctgtagaaatgtgggattatcgtcataaacgtatcggcgagttatctggtggacaaaagcagcggatttgcttagcgcgaatgtttgcaacagacccagatatattaattttggatgaaccacagacggcgatggataaacaaagtaaaatccgtttttataatttattaaagcatgaagcgcaagtacatggtaaagcgattttgatggtaacacatgatagtgaagaaatggaagactttgtggataagcatattcgccttattagaaaggaggatgtgtcatggaaatgtttctctatggatttatgcaaagagccttccaagcgtccatgataatcgctataattgctcctcttttaggagttttcttgattatccgcagacagtcacttatggcggatacactttcgcatgtgtcgcttgcgggggtggcttttgggttggttttaaatgtgaatcccagtgtgacaacgcttattgtagtagtcattgcggcgctcgggattgaatatttgcgcggggtttatgtaacttattccgagttgtccattgcgatactaatggctggtggacttgctgtggcgttagttctgatgagtttagatcagggtggaattacaacaagcgtgcagcagtacttatttggttcgattgtaacaatcagtaaggcgcaagtgcagctgttggtaattttaggagtagctatcgtagtattgttcttagtatttaaaaggtttatgtttgtacttacttttagtgaagatgttgcagttgcagaaggagtccctgtaagattgatttcgcttttattcagtgtggttactgggattgcgattgcggttattatgccaatagccggagcgttactcgtttcagcgctcattatattaccagctgcaatcggtatgcgaatttcaaaagggttcctgatgtgtgttattagtgcaattctgattggcttagtcggaatgttttccggccttgtgtcttcctaccaactaggaaccccacctggcgcaacaattaccttaatgtttatcattcttttcattatttcgactgttgttttaaaactaatacgaaaatgattttagaacgatgtttgaccattctgtatcattgtataaagcgcttggtcatgaataatccaacacttttctttcttttcaatctgatttgttgttttaagatattgcaaatctttgtaaaaacagcttttcgaaaggttactataagaaagtagatgacttgttttaattgcttgaggaagaattactgtaccatcatcactcagaactccatgtaataaagccatattcgaaaatgtcgttttaagtttttcagaagccggactacttgccattaagcttttaaagtaaacatgagtagtctggtttttcataatgaaaaattgaaatccgaaattctcgggaaacattgaaaggaaatactccatatctgctttcgaatacttatataatgaacatccagagagagtcttaaaattaaaatgattattactttggtcaagtaatgtaaaatagttcaaaaatgttcctttaccttgaatagaatagattttggaattttggctaccatcatttaaaatcaaagcaatatatccatcaactacaaggtaaatatggttatctatatcaattttttctgttaataggctggcgtttttcggtacatcaatttgttcataagctatttttccttcatgggataaacgaataaattcttggtaattatataaattttttggcatgattgttttctccaatcttcttttgtaaacataattgtatcagaatgcaaaagaacggttttacgcagtctagtagtgttttacgtataaatgtttctgaaatgtgaaatttttaactcattataagtctttttttagtgaaaaatactgataagcttttgtggtgtgcgagtttagactgttttgccacgaaagtccgaaattagtctttttttatcgaattgttgcgaacgtaggttctgtgttataattcaactggattgtaaaggaggactattgatgagaaaagtgcgtatttcagttaggcgtttagtagagtttgtgcggagaagcggtagtattgataaccggatgactagttcagaccgcgccttagaaggaacaaaaattcatcaattactccaaaaagaagctggggaagaatatgctgcagaggtacggctaaacctagaccgaatagtggacggaattgctttttcgcttgatggacgcgcagatggcatcataaatggccgaatgattgatgaaattaaaacaactgagacgccaatggatgaaattaccgaaaattttcgacctcttcactgggcgcaacttatttgttatggatttatgcttgcagaaaagtccgatttggcagaagttactctacaattaacgtattatcaagtagttgacaaagaagtaaaacaatttcaacgtgtaatgagtcgcgaggaactgagcgtttttgtggacgatttactttcccaatacgctatttgggcaaaggcatctgccgcttgggaaatgaaacgaaataaaacaattcaagaattaacgtttccatatgacagctatcgaagtgggcaaagagagcttgccattgcagtgtaccgaacaatatcttcagaagaaagtttgttttgtgaagcacccacaggtatcggcaaaacaatgtcgaccttgtttcccggtattaaagctatgggtgaagggaaaacggataaattgttttactttactgcaaaaactattacgcggcaagttgccgaagatgcgctagatgagatgcgtcgtaaaggacttgctgcaaggagtgttacaataactgcgaaggataagatatgctttttagacgagaggaaatgtgaaccagatcattgccaatttgcgcgaggttattatgatcgtttgaacgaagcattgtttgatatgttgcaatccgaagaagcaattacccgtcaagttgttgagagttatgcccggaaatacacactttgtccatttgaattatcgctggatgtggctcttttttgtgatgtaatagtttgtgattataattatttattcgacccggtagtctacttgaaacgtttctttgcagaagggccaggtaaatatacttttctggtggatgaagtgcataatttagtagaccgtgcgcgctcgatgtactcagcgacattaaaaaaatctgcagttatgcaagtcaaacggggactggacgcaaaaaataacaagcgattgctaaatgcaatcaatgtgatgaataaagacatgatcgcactcaataaaaaactaaaggatttagatggaactatatatgtgcaaaaaaatgaactcattgattggaatgaatcggtcctaaaattcacctttgtagcgaaggaatggttgccgcaaaatactcagtcagaaatacaagcggatgtgttggaactttattttgaaagtttgagatatgttgcaattgcggatttttatgatgatcgttacgtcacacaagtaacgaaaagccacggagatttagaaataaaacaagtatgcttggatccgtcgttcttattatcagaaagactgaaactcggaagcagctcggtgctcttttcagcaacgcttcgaccaatagattactatacaaatttacttggtggtcaagaagacacgagtagaatgattttttcttcaccatttaaacaaaaaaacatgcatttactagtagcggattatattagtacgaaataccaaatgcgcgaaaatagtatggaagctgtcgtagatgctctctatgctctagtctctggggaaaacggcaactatttatttttctttccatcatttctatatttacaaaaggtatacgatttatttaaagaaaaatatcctaacatcaggttgcaaaaacaagaaactgctatggatgaagagcgacgggagcattttttagaaagatttcaagcagagaatgtagaaactttgattggcttttgcgtcttaggaggcgttttttcagaaggggtagatcttcgtggcaaccgattagtcggtgcggcagttgttggagtaggacttgcgcaactgaatcacgaatctgatttaattaaagattattataatgaaacgattggtcggggatttgattatgcatatcagataccaggaatgaataaggtgcttcaagcagttggccgggttattcgaggagaatcggaccgtggcgtagtgttgttaatagaagaacgattttctgccgatcgttaccgagcattattccctacgcactggaaccatgcgaaaacagtgaagagcacagacgatatctcccgagaagtggccggattttggcggaatagctaattttctagtagaatagaagtaattagtcatttttgggaggaaattatgtataaaattattgcgatagatattgatggcactttattaaacgacacacacgaaatcacaccagctgtgcgtgattctattaaagctgcgaaagcaaaaggggtaaaagtagtattatgtacaggtcgtccacttgcaggaattaaaaaaagcttaattgaactagatcttttagatgaaggggattacgcaattacgtttaatggggcggttgtgttagaaacagcttcagaaaaaacattagcagatataaccttaaataaaactgagctagaagaaatttatgcattttgtcacgcggaaaatgttaacgtcacttattttgatggaaaaaacatgtatgtaccaagccgcaaaatcacagaaatcacttgtcaagattcgctgctacttggtacgccactatatcatttacctgtagaagaagcgcctgaatctattcatgtttccaaagttatgctattagactcacctgaaaaaattaccgatgtgataaaaaaattaccagagaatatcaaagaaaaattttacgttgtccggagtgttccatataacttagagttcttgcaaaaaggggttaataaaggatcagcgctcgctagtttagcagataaacttggggtggaccaaagtgaagtcatgagtattggagatcaggaaaacgatattaccatgatcgagtacgctggtatgggagttgcgatgggaaatgcgacagagcatattaaagaaatcgccaactatacaacaactactaataatgaagatggtgtggcacaggctattcaaatgcttattctggaccgataaaatagcgaatggtagtaaaaatagagtattgcaataaagtataaatggatactaaaaagcatacacattgctacaaaaagccgaaacttcctataaaggagtttcggcttttttgttcaattaagtactttataatatatagtcctttaaaatagtcactaaaagttcataaagatggcgttttaggagcagtacttccgaaaaatgatatagcttggagttactcaattgtcatatgatatgtgataataacaaaacttcattagtaaaggatgaatttgtaatgagtaaaaacggaaactttttaaaaaaagttgggttagctttcttaagtattttaatcgttgctagcacaatcttccaaacgacagttgtgaaagcagcaacgagttatggttctcagtttttaaacacagtagaacttttagacaaggacggtgtgccgcaaacggattttggctactatgacaacatggatgtgcattacacttggtctatccctaattcaacaaacgtaaaagcgggcgacacaatggatttcacgctgccaagtcaattggcgctggcaaccgatctcgcttttgacgtgaaagatagtaaaggtcaagtagttggaacggccactgtaaaaaaggcaacaaatcaagtaacactagttttcagtgattatgtagaaaaacattccgatgttaagggcgaactggatttctggactgctttcaaccaaaaagtaattactggaaatgaaacagttgatttagtattccctcttgaaaatggaacaaccgtaatagatgtagaagttggtgaaaaaacaccagttagcccgacagaaacgcttttcaaatatggttgggtagatgctagtaatccaagtttgattcattgggttgttcgcgtgaattacgctaaagttaatatcccaaatgctgttttcaccgacatcattggcgcaaaacaaacattaaattttgattctattaaagcctttcacggaacgtactcagcggaccgagtatttacagcaggtgcgccgatttccagcaccaatttttctgcgacaagtgacgggtttagtgtagctttaggaaatctaactgattcagtgcaaatttcttacacaaccactactacagatggtgggaagtccactcagtatgataatactgctaaattagccggaactgattttgtgacaaagcaaacgtctacttggacaccagcatcaggcggtggcggtgaaggaggaggaacaactggttcagtaacacttacgaaagaagatgcgaaaacaaaagcaaccctcgaaggtgcggaattcaagttggtggattcaaaaggcactgtgctacaagaaaacattacaacaaatgcgagcggacaacttagcattgctgacctgaaatttgacacctaccaattaatagaaacaaaagccccgacaggctataaacttgatacaacaccagtagaattcactattggtgaaaacaaccaagcaattacagtaacaaaagaaaacacacttaatacaggctccgtagaattaacaaaactagatgccgcaaccaaagcgaccttagccggagcaacatttgaattacaagataaagaaggaaatacgctccaaacagacttgaaaacagatgaaaatggcgttctaaaagtaactgatttagtaccaggcagttaccaatttgtcgaaacaagtgctccaacaggctacaagttagacaacagtccagtaagttttgaagttatcgctggtgagacagaccaagtagtaaaagtaacaaaagaaaacacactagaagttggctccgtggaactaacaaagttagactcggcaaccaaagcaaccctagccggagcaacatttgaattacaagataaagaaggaaatacgctccaaacagacttgaaaacagatgaaaatggcgttctaaaagtaactgatttagtaccaggcagttaccaatttgtcgaaacaagtgctccaacaggctacaagttagacaacagtccagtaagttttgaagttgtcgctggtgagacagaccaagtagtaaaagtaacaaaagaaaacacattagaagttggctccgtggaactaacaaagttagactcggcaaccaaagcaaccctagccggagcaacatttgaattacaagataaagaaggaaatacattacaaactggtttaactacggacgaaaatggcgttctaaaagtaactgatttagtaccagggacataccaatttgtggaaacaaaagccccgattggatatgaacttgatacgaccccagttagttttgaaattgtcgctggtgagacagacccaatagtaaaagtaacaaaagaaaacacattagtaccaccaacaccagtaccaccaacaccagtaccaccaacaccagtaccaccaacaccagtaccgcctactccgttaccaccagtaccatatgaaccaactgtgccaccaacaaaaccagaagtaccagttacgcctaagaaaacagaaaacagcgaggatagtccaaaaacaaccccgataagaataactcaaagtcttcctaaaacaggagatacaaatagttttgctggcttaggagtaatcctgatagccttgtcattaagcggtcttctgctgaagcgcaaatagaaaaaacaggcttagataattatctaagcctgttttaattaggtcattttagaatcctaatcgtcacaaaacgttcacgattaggaggttttttgatagataagaaccgatttttaggaaaaataatgtataatcactatgaattagtaataaatttatgattgaaattaactaaaaaaggatggtttttttatgaaggaacgcacgacaatgatgtctaatctaaagaaattcggattagcatttcttagcgttatcttgcttgtaaacgttatatttcagactaactttgttaaagcagcaactaattatgggtccgattttttgaaaactgttgaattattagatgcagatggaaatccccaaacggacttcgggtattatgatagcatcaaggttcactatacttgggaaatccccaattcaactaatgttaaggaaggcgacacaatggaatttgtgttacctccagagctgaagatagttacagatttagacttttctttaaaagatcacgatggcaacacggtaggtcatgtgattgctaaaaaatcgactggccaagtagttattacatttacagactttgtcgaaaaaaactccaatattagtggatatctcgatttttggactaattgggataaatcattagtagaaggtaatgaaaatgttccagttgaatttccagtaaatggtaccacagaaacaattgatgtgggtgttggaggcaaaaatcaaatcgacccggatgaaagcttatataaatacggctgggctgatgctgaaaatcctgagcttatccagtgggttgtgcgagttaactattccaaacaaaacattcaaaatgccgtttatgaagactttattggaccaaaacaagtcgttgattttaattcaataaaagcattccacggcgagtttgacccggatgataacttcacaccaggagctgaggtgccttcatctgcaattactcaaacaacggatggttttaaagttgatctaggaaatttaacagattctgtcaaaatttcatactacacaacttctaccgacaacggagcatcgcctaactacactaataaagggcaattaacaggcgataacttcattaaacaagaaatcgaagtcgcaacaccaacatcaggaggcggcggtggtggagaagggacaactggttctgttgaattaacgaaaacagatgattcgtcccaaaaaaatccgctagaaggtgccgaatttaagttagtcaacggagcaggagccactgtgcaaacgggattaaaaaccaatgctgatggaaaactggcaatttcaaacctgaaatatgacacataccagctaatcgaaacgaaagctccacaaggatacgtgttggatgcgtctccagtgaaattcacgattgatgatacccaccaatcattattcgtatctaaagaaaatactgccatcaaaggatccgtttcactagaaaaagtcgaccgtgacacaaaaagtcttctagctgatgccgaattcgaattacaagataaagatggtaacacactaaaaacaaatcttaaaacggaccaaaaaggtaaactaacggttgctgatttacttccaggtgagtatcaatttgttgaaacaaaagcaccaacaggttatattttagacactacaccattgaaatttaaaatcagcacagaagcattaaacgtaactgtaacaaaagaaaatacgaaaaaaccagaaataccaaaagtgccagtaccaccaaaaaaaccagaaaaaccggataaaataataagtgaagacagcaaacagacagctttaccaaaaacaggagattcgccacttgttaatggatggggactgttactcgtagccatttcagcgagcggcttaattgcacttagaagaaaataataaaaaaccgtaagcgataatacaatcgcttacggtttttcttatatagttctagtttgatcttgcaaaacggcctttaacgaatgataggctggaatagataagtttaagtcaacgcgattaatttgttgcgccatttttggttggataccagaaataaatgcctcgacgccaagaagtttgagcatcgtcactaagttggtgagcatctctcctaacgcatcgtcaaaatacgtgattccagataaatcaatacacaattgttccacgcctaaatgaacacatttatttgcagtaatttcggatagcttttctgctctttcacgatctacacggcccattaaaggaagtatcgccaatttgtcagtaatggaaatgactggggtgctaatttcttcaattaagcgatgttgttgttctagatgtttcacgatatcattgtaatacattgcagaaaaggcttcgtttattcggtcgaatccgtgattaaccattgccatgcttgatgagaattcacatttagacacttcatcattatgaatacaaaagtcaccaacggctgtaacaaattcgcgacgtagtttatctaaggtagtaataacttcaggtaatggcacttcattttccatgcgacgtgcgtacatgttatctagccatttgtcgagtttctcaaagaacgcttttttaccagcaaaataagaaatgattaagtccgctgtttgttcactgtcagcgcgcagttcatctttatattgtggagagtaaacaaagctagtatacgtattttcataaatttttgataaccaattattaatgatttcttcggtatgttctcttaaatatagctccatacttccattcgattcattcataccagacaacccctttaagtctaagtataataactacttttctttattctatgctcaaaacggtgtactgtccatttaaattttagaaaaataactaatttattgaaattgtaatattagttaacaaatccaacgttatttttttgttaaaattccgaagctatttaagcttggtcatggtataatattacaatatggatagaaaggaagttttttgtgggattacaggatgaacttacaatgatgcaaccagtggtcatgaagattttttcaaaaagtgtccgcgaaaatcgattatctcacggctatttattcgaaggaacaaggggtacagggaagaagcgcacagcactttggttagctcagagccttttttgtttagaaagcactgaaaccgagcttgcttgtggaaagtgtaccaattgcacgagaatagcgagtcataatcatccggatgttcatttgctagagccagatggggctagtattaaaattgatcaggttcgcgcgcttaagcaagaacttagtaaacgtgggatggaatcggatcaaaaagtagttatcatttacgatgcagaaaaaatgactgttcaatcagccaatagtctgctgaaatttatagaagaaccagaaggcggtttgttattattatttttaacaacaaatcccgggcaaattttgccaacaatccagtcaagactgcaaccggtcacattcaaatcactgacttttgatagtttactcgcatcactaacagcagcaggcatttccgaacaaaaagcgcggatttatgctagcattactgggagtgtggaagaagcgaaggcttttgaagagagcgagtggtttagtgaggcaagaaatgttgtcatcaagttatacgaaggaattcaccatcaaggaaccagcccattaattatcattcaagaatcatggatgccactttttaaagagaaagataagatggcgcttgggctcgaattgttgttactgctgtaccgcgaccggctacaccttacacttgacgagaactacgaaccaatttgtacagcgcaaaaagaaatgctcggacaagatgcgctgcgcaagtcactgtccgaaaccacaggggaaatcgagaagattctcgctgcgaaatcaaaactggattccaatatgaacacgcaacttctaatggagcagttagttctggaaatccaagggaggtaatcgctatgcttaaaattgtaggcgtccgttttaaagacgttggtaaaatatattatttctcacctggcgaactggaaatcacagaaaaccaaggtgttatcgttgaaaatgcacaaggaattgaatttggtaaaacggtcattgaaccacgctacgtggacgaagaagacgtcgttttaccacttaagaaagtactgcgtatcgcaacagaagcggattataaatgcgttgctgagaatggcgactcttgtcagaaagcctttttactctgtgatgaaaagatccgcgagcgcgaacttgaaatgagtttggttgatgtggattatacatttgaccgtaataaaatcattttttactttactgcagaaggtcgcgttgatttccgggagctcgtgaaagatttagcatctgttttccggactcgcatcgaacttcgccaaattggtgttcgtgatgaagcgaaattgctcggtgggattggtccatgtggtcgtatgctctgctgttccactttcttaggcgatttcgaacccgtttccatcaaaatggcgaaagaccaaaacctgtcccttaacccgacgaaaatttctggcttatgtggacgcttaatgtgttgcctgaaatatgagaacgatgaatatgagcaagctaaacgtgaaatgccagatgttggtgtaaaagtaaaaactccagaaggcgcagaagcacgtgtttcgggaatcaacttgctttctagaatcttacaagtgagtttgcccgaagaagagacggttatagaatacgaattggacgaattacgcccatacaacgaatttctaaaacaaccggcaaagtcttgaggtgaaaaaattggataaaaaagctatttttgactcagtcagtaatatggaggagcaaattggcgaattgtatcagcaacttggagatctaaagacaaacttaggcgaaatgttggaagaaaataaccgattaaaccttgaaaacgaacatttgcgacgcagactttctttgaccgatgaagcgacaccggaacctaaagccgaaacagaggcggaacacggtgtaatggcgcctaatcgtaaggaagcaatgcagcaaatgattgaacttggggaaggttatgacaatcttgtccaactttacaaggaaggatttcatgtttgcaatgtacatttcggcagcccgcgtggtaatgatgaagattgtttattttgcttatccttgctcaataaaaaataacatgacgggcctttctcgattcaggagaagggctttttgctagaaaaggtgaatcatttggaaaaactcaaattaataggtgatgaaagactggattatttattagcagaaaatttgcggattattcaaagcccatcggtattttctttctcgatagatgcagttctcctagcgaaattcagttatttgcctgtgcgtaaggggaaaataattgatttatgtagcgggaatgggattatccctttattacttagcacgcgaactgaagcgcaaatagttggtgttgaaattcaggagcgcctggcagatatggcgaaaagaagcatttcgtataatcaattagaagagcaaattgaaatgatcgaatatgatttgaaaaatattacagatcttattccaaaagagcgcgcggatattgtcacctgtaatccaccttatttcgcaaccccggatacaagtttgaaaaataccaatgaacattttcggattgctcgccatgaagtaatgtgcacgttagaagatactattcgtgtagcagcaagccttttaaaacaagggggaaaagcgaattttgttcatcgtccggaacgattactagatatcattgatataatgagaaaatatcgcttagagccgaaacgcattcaattcgttcatccgcgcatagataaagaagcgaatacggtgcttgtggaaggaattaaagatggaaaacctggtgtaaaatatgtaccacctgttatcgtatatgatgaacttggagaatatactccagtaattaaggagattttatatggcgaaagcgagtgaacatttcttttatgtgctaaaatgtagtgataattcatattatggtggctatacaactgatgttcttcgccgagaagcagaacacaatgcgggaattagatgtaaatatacaaaaacgcgtcgtccggtaaaagtcatccattttgaaaaattcgaaacaagaagtgaagctacaaaagcagaagctgcgttcaaaaaattatcacgtaaaaataaagacgcttatttaatacaacgggaggaggagtccgagtgataaaaagtcaaaagagtttcagcggaaccagccaaggggcattatatttagtgccgacgccgattggtaatttagaagatatgacttttcgtgcaattcgcatgcttaaagaagcggatattattgcagcggaagatacgcgaaacaccgtgaaacttttaaatcattttgaaattacaacccgaatgacgagttatcatcagtttacgaaggaaaataaagaagataatattattcagcgaatgctgggcggagaagtggtggcgctagtgagtgatgctgggatgccatctatttctgacccgggatacgaacttgttcaaagtgcgttagatgctaatattcctgtcatcccattaccgggagccaatgctgcattaactgcactgattgcatctggtcttgccccgcagccgttttacttttacggatttcttccacgccaaaacaaagagcgtactcaagcgattgaaaagttggcggctcgtgaagaaacgtggattttatatgaatcaccacatcgtttaaaagaaacactaaaagcaatcattaaaatcactggaaatgatcggaaaatcgtcctgtgtcgagagctcacaaaaagatttgaagaatttttgcgtggaacggttgaagatgcgctgaactgggcaatggacgaagaaatccgcggggaattttgcttgattatcgaaggcaattccaacccacaacttgcagaagagcagctctggtggcaagaactcgatattaaaacgcacgtaagcaccgtaatggaacaggaaaatgttagttctaaagatgcaatcaaaaccgttatgaaagcgagaaatttaccaaaacgagaagtttactctgcttatcatgaaataaaataaaaatcatgtgcgaatccttgaatgggaactcgcacatgatttttttataatgtatcgccaaagcggcgtttaatttcttccattaatgccgcagcaccttctttactaagcgtcagtttgccgtccacaaatttcttattatcaacagaaaattctccggtaacatcacaaaccaagccagcagaatacttcttcaatataatcgcatcttcatctgtaaaaatttctaagggatcttttacatttaggttcattgtccttcttatttcaatcgggataaccacacgaccaagttcgtcgatttttcttaccattccagttgatttcattttctcaccttcttgataattttaattcattttaacagataattacgggaataggaatgatttcatgaggaaaagggtatagaccataagcagaagaattagggggaataaaaaatgaacatagttatagcattaattccggcagtgatgtgggggattatgccattagttgtttcgaaaattggtggtaagccgaggcaacaaattattggtacaacgttcggggcattagcattcgcaatcggagtttttatttttacaaatccagagtatacggcaaccataattattgctagttttgtctctggggcattttggagcttaggccaaatgaatcagttccgggcatttacacaagtaggcgtatcaaaaacaatgccgctttcaaccggaatgcagttagtaggtacatcactttttggtgtattcgcctttcatgagtggggtacaacttccaaattagtattaggattttccgcattagcattaattattatcgggatatttttaacaagttatcaacaacataaagacgaaaattccggtcaaaatatgaaaaaaggaattatcactttacttatttcttcagtaggttatgtaggttatgtagttatcactcgttggtttgatattagtgggtgggacgcgattttacctcaagcaattgggatggtagtcgcaggattattattttctattaagtctgaagaaaaacgttttacaaagcaaacgtggttaaatatgattccaggggtgatgtgggctactggtaacttggctctactattctcaaataaattggttggaatcgccacaggtttttcgctctcacaaatgggcgttgtcatttcaacaattggaggaattcttttcttaggagagaaaaaaaccaagaaagaacttattttggtcattatcggagtagtcttagtaattatcggtggcacgatgattggaattgcaaaaagctaagaacagcttccggtttgatataatgctatacttaaaataatctaaactaaaggtggttatattgataatgaatgcgaatttagaagtaaatgctgagcttgtaaaagaatcctatgtttatttattgtcgcgatatctcgttttacgccaagaaaattttgatacaaaagaagataaaattccatataacacactaaagcataattcggtttctccagcagatgcgaattttgtaaatccaaactttgatgtggtttattctgaagcttggatagccgtagacgacgaacatgctgttgttttagaagtaccagaaataaaaaatcgctactacacggttcaacttttagatggttggggtgaagtagtaactaatatcaacgaacgtaattttccagagcatccacatggaaaatttgctttcgttaaaaaaggaacaaacccttccattccaagtgatgctataaaaattgaattaccatctgaaaaagtgaaagtgctacttcgcgtagaacaaaaagacgacccagaaggcgcagtaaaacttcaaaaagcattcaaattcgacgcaccagataatataaaaatcaaagaaccgttagaaataccgcatttcactaatgcagagttcctcttagaagaaatttattccaatttagaagaactgctggcaacttatccagataaaatgccaaaagcagctgagtttcaagataaagcaagaaaagttgcagcttatatcgaacttggtgatgaccaaaaagctgaggttagaaacttaattgtgaaagaagcgcttccatattttactaatggggcaaaaggatttggcacgcaaaaaggtggatggtctgttacttacgtagctggtgctttcgaaaacgacattttagctcgagcaattattaattacggtggtatttgggcaaactctatccaagaagctctatatttcatcggtcaaaaaggtacggatgatgaattgctaactggagataaaatttataaaatccatttctcagcagacgaacttccagcagaacttgcaaatgctttttggtccgttaccttatatagtgttccggattatcatgttatcccgaacgaattaaataagttctgcatcaataattacacaggtccaaaactaagtgaagatggcagcttgactctttacattgcgtctgaaaaaccggcagatgtagatccagggaattggctaccaagtaaggctgggaaagaattctcactaaacttccgactatatgttccgaaaaaagaagtattagaagggaaagtattcttaccaccacttgaagtcttttaataaacaaatgaagctaagtatgaaactatcggttttatacttagcttttttgtgctttatactgttaaaagactattttaataggttttgatgagagtaaagcttgtttgttcacatggaagacataaacaaagcttatttagcgtaaactaactactaaaattggtttttggaccaaatctagtctgctataataaataatattagatgatattaattacaacctggaggaaacaaaaatgagaaaaataccagttgttgtttctcttgctttgtgttttagcctagtaagtcctagtttgtatgctagtgcagatactataactgcggtccaaatcactaaggaagcaacaaccgacactacagaacctacaactattgaccagcctagcagaatggacaactcgcaaaccgcaccacagaaaatgacagcatcatccagtgaagaagctgcaactactaactcaactgaagaggaaaatacacctaaaaataatttgaaatcaacttctgaaaacagcaaaacatatgctgaactatttccggatgttaatttagccaaaataatagctaaaaatattagtggaacagaagatattaatgcagaagtatcagaagcagaattacaaactattactaatttagtagcaacaaaccagaatattacgagcttaactggcatagagcatttaacagcgttagaaaatatcaatgtgaacaacaatgagctcacgacaatagattcgttatttaatataccaaccttaaaatcaattagcgcgaataataataaaataacggggaattttagtttggtaaaaactttgccggaattacacacgttagaagtgcttggtaatgcaattacagagttagatattgaaaaccaacctaacctagtaactttgtcggcagatgaattagaattgaaaaagctaacgttgaaaaatttatcccaattaaacggactaggaagaatagcttccagtatttctattgactggggtgatctagagagcgtcactttaatgaatttaccagaaataataagcgtagatattagtgggaattatttagacagtgatgatatacatttggagaaccttcctgcagttaagaacctggatatcagtagtaatgaactaactcggctaccgaaaattaacgattttccgcttctgactacaattaatgtaagaagtaataaaatagataggctagaatcaagtaaactagtcgatgtaccaaaacttgcgacactaaatgcggataaacaagccgttacgctttcaaaaacgatagcagcagggaactttacgataccgaataacgttgagaacttagcgggacaaatggttacaccgaaaataatttccaacaacggaacttactctgatcaaagcatcgcatgggcaagcggagaactatcaggcttatcaaaagtttcttatacatttgatgaagtgattaatagtccggcaattgctggcaagtacactggaacagtaaaccaaccaattgaagtcaaggcagtacctgtaattgtagcggataagagtgtttcgtacgcgcccgtaaatgcaaaagatgaggcgacatttttacaagatattcgtgcgtctgcttcggaaaacgcacagattactagcgattatagcgaggtagtcgactttgcaactccgggagattatacagtcacgctacatgctaaaaatgagtttgacttaaaggcagatccggttaccgttgtcgtgcatattaatgatattcaaaaaccacaagtcgcggttaactcgaacgatatttcatttgaagtaggaacagaattaactagtgaagtgcttcttgctaaatctggcgcggtagttacggatctatacgacgaagcaattaagatggaagttgacttgtccgaagtggattcaagcaaacttggaacgtatgaagcgacgataatagcaaaaagcaaaagtggtgcttcctcggatccaatcaaactttctgttaaaatagtcgataccgaaaaacctattattcaaattaacaatccggaaataattattgaaaaaggcagcgaattaacagagggtcaaatcattgaccaagttggaataactgcaacagataattatgatcaagatttaaatatccacatggatttatctaaagtagatacttccaagccaggcagttatgaagtaaccatttatacagaagattcatctggtaatcgttcagaaacagtaacgatcaccgtgaaagtaccagaagctagaatagggaaaattactattcaatatatggatagtgaaaacaatgaattagctgaaagtaatacgattactggcgaagttggtgaaacgtatgaaacacttgctaaagaaattgaaggctatacgctaaaagaaaatccagctaattcaagtggggtttttgaagaaactagacaaacgattcaatatatttacgtgaaagatataattaacccagaatttccagtatacagcgaaaacaacgtaacaccagaactcccaagtaacaataataactcggtcaatgggtccaggcaaacaccaagtaaatcagtaaagaaacagtcaaaggcatactcgaaaattaatcaaatgccaatgaatcttccagaaacaggagatagcacaaatttactctttatttttatgggtgttctgttattagctggattaaccctctctaaagctaaaagaaaaaatcaataaaaaaacacctcgtaaatcttgcactgacatggaaaaatgagaatgaaataaaaaccctttaaattaggctgcttgtttcctgaaattaataggagattggtagcctaatttttgttgaattcgtttttcgttataatatttaatgtaatcttttacgatttggattacaatagatttagcgtatttatacgctgttttatggtagaatgtttcgcactttagcgaggaatggaaacattctatgggagcgttgtctgcgggtgtcccttttcgggacatactgcggataacgtttttctttttacagcactgataatattcataagatgtgtacaccgaaccttgatcgctatgaagtaaacttccttctggaagggacaactgatttaatgtatctagcactaattctgtgtctgtttttcgccaatggagtaggcaacgatttctccattatacaaatccataatgcttgataaatataaacggcagtctccgaaataaaggtaggtgatatcggtagttaatttttccagcggctgactagcttgaaagtttcgatttaagtggttttctgtttgatagtaggcggagcctggtcgatttttcttttttacttttacctgacattgccactgatatttttgcataatacgctgtactttattgatgccaacttgttcttcttgtttcattaatgcggcgatttttcgataaccataagtgaactgatatgttttacataactgccctattttttctccaatgagctctgtgcgaaatctttctttttccagtgataataggtagataaaggtacttgtagtatctgacagatatctttgacaagatactttgtttttagctcttctactaacaaaacaaaatatgctggattcacttcctttccaatgccttgtacttttttaaaatttccagttctagctctttttgccgaagagctatttttaattgttctatttctggtaattcaggcacccctttttggtatttatattgtttacctaccccttggtgaaacctgtgggtttcttcatttcgataccagcgccaccaagttttcacttgtgttggatttttgatgtttaatgttctcataatttctttggtagatttacctgctaatttcattttgatagctttttcttttatttctgctggatacattactcttgtactcatagaaacacctccgttagtttcattttacatgaatccaacgaaggtgtttttatcttattctcattttttaatggcagtgccatctttacgaggtgtttttttatttctttttaaataatagtaacggggcactgattaaaagaagcaaggctccgaagatagtggatgatttactttggtcagtatcaccagttgttggtaaagagctataagttgttttttctacagaattactagtactaggattagtattatcattagctggttttacagttacaggcttattaactactggattaactggtttaaccggttcaactggattaacagtaattggtgtaggtgttacggtatcttttttataaatataatcaactgtttgtggagtatcagtgaaagtaccagttgcgtttgtaggtgtagtttctaaagtataaccggtaatttttttgctttctgactgataattactgttgacaactccagttaatgtatctgattctgcgattttattaccattgctatcaagatgattcacagtgatgtttgccccagctacgggtgcaggagtagacacatgaacggtgacatttagtgtatttgagacgttacctgctttatcggttgcttgaacattgaccgagtaatcaccactaactgctaaattaactgcggaagtaaaattgcttgtaagactaatagtggagtcataattatcagtaacgctagcatgaatgtctgttaaaaattgttcttccgtaacatcacttccagggctgtatgtgatttctgtttcttctgctttaacaactggtgcgctaatatcttttggttttaaagagccagtggaggtggatttgttaccagctttgtcttcgcttgtagctgttgcggtcgcaactaaagaatcaatcttggcttctccaccttcacctgaataagaagttttccagtcgaactttacttttgctttggataaactatcccaacttgttactttgtcgaatttaaaagtaacagtgttagtggaattgtcaaagctagttgtcccaacttggtttgtaatgtcttccccaccaacagaaacctgtaagtccgtatagttcatgccacttggtagcgctaattttatttccagtttatagtcttcctgggtttgattcgttaaagttggaaatgtaagagtggatgtgtatttatatgggacattctcattggtattttgtagtaatgcaatattatttgtatcgtgagtatcagcaagtgcagaaataggtgtaagtgctatttgactagctagagaacttaaaactataaggctagcgatagtttttttcttattaaacattatataaataacctctttccttgaattggaatttaatgtaattaaagtatagcactcgattttggggcgttagtttaattctagtagcattaatatggtatattttgtcgaaataatgactaatgagaatcataaaaaggtaaatcgttaatttaaactttaacagttagcgctattaagtacttttactcagaaaacctctaccatcttcttgttatttcagctataatgaagtaattgaaaactaaattaaaggatatacaaggaggaaaacgatttgaacattatgattgcgctgattcctgcattactttggggaacagtcccgctaattattacaaaatttggcggttcaacaagacaacaaacgatgggaatgacactaggggcactcacttttgcggtaatcgttttcttctttactgatccagtttatacgcttaaaacagtagggattagttttataacaggatgtttatggactgttggtcagatgttccaactgcaagcattcaaaattatcggtgtttcaaaagcaatgccgatttctacagggatgcaattagttggaacaacactttgcggggtaatcttatttcatgaatgggatacgacacttcgaattattttaggttttatagcattagctcttatcgtcggtggaattttcttaacatcttatgctgaaaaagaagaagatggtactaatgcattaaaacaaggtttgatcacattattcatttctgcttgtggttatgttggcttagttgttctaattcaaggtttcaaaatcgatggaattaatgcgattttgccgcaagcgattgggatggttataagtgcgctaattatgacacacagtggtggtacggaaaaacgcttcaataaacgaactctcttacttactattccaggagtgatttgggcagctggaaacgttgcgatggttcacgctaaccaacttgttggagtcgcaactggtttttcactttcgcaattaggagttgttatctcaactattggaggtatcatacttttaaaagaaaagaaaacgcaaaaagaaatgctttttgttattgtgggcgtagttttagttgttctcggcgggattttaatcggcgttgcaaaaggcgcttaattaattatttcgtttagcgtgaaaaatgatataatgatactaattgttttatttttaaggagggaattgtgttgcctgaagagaaaaatacgttttatattacaacaccaatctattatccaagcggaaaagcgcatatcggccatgcttatacgactgtcgcgggggacgcgatggctcgttataaacgcttaaaaggatatgatgtgttttacttaactggaacagatgagcacggtcaaaaaatccaagcgaaagcgaaagaacgcggaatttctgaacaagaatacgtggatgaaatcgcagaaggcttccaagaactttggaaaaaactagaaatttctaatacggattttattcgtacaacacaagaccgtcataaaacatcggttgaaaaaatctttgaacaacttttagagcaaggcgacatttacttaggtgaatacgaaggttggtactctgtttctgatgaagaatactttacagaaacacagttagaagaagtatataaagatgaaaatggcaaagtaatcggcggaaaagctccaagtggcaatgaagtcgaacttgttaaagaagaatcctacttcttccgtatgagcaaatatgcggaccgtttagtagaatattataattcccatccagaatttatccttcctgaatccagaaaaaatgaaatgattaataatttcattaaacctggtttggaagatttagcagtatctagaacaacttttgattggggtattaaagttcctggtaatccaaaacatgttgtttatgtatggattgatgcgctttctaactatattactgcgcttggatataatacggacaatgatacgaaattccaaaaatactggcctgctgatgtacaaatcgttgggaaagaaatcgttcgtttccacacaatttattggccaattatgctgatggcactagacttaccacttcccaaaatggtattcggccatggctggattttaatgaaagatggtaaaatgtcgaaatccaaaggtaacgtagtagatccttatatgctgattgaccgctacggcctagatgcgcttcgttattacttattacgcgaagttccatttggctcagatggtttatttacaccagaagactttgttgatcgtgtgaactttgatcttgccaacgatttaggaaacttgcttaatcgtacagtagcaatgattaacaaatactttgatggtgaaattccggcttatcaaggtaatgtaacagaatttgatcaaattttagtagattttaaaaacaatgtggtgaaggaatacgaaggtagcatggatcacatgcaattctctgtagctttaaaccaactgtggtcactaatttctcgtacaaataaatatatcgatgaaactgctccatgggcacttgccaaggacgaagataaacgcacagaacttgcaagcgtaatgactcatttagcggaaaacctacgtattatcgcagtgcttttacaaccattcttaacaagaactccgggcgaaatcttcttacaactaggtttacaagaagaaaacttgaaaaaatgggatagcatttatggatatggtgaaattccagcaggcaccactgtggtgaaaaaaggtacgccaattttcccgagacttgatgcagaagtggaagttacctatattcaagatgaaatgaaaggctctgcaccagcgcctgccgaagaagtggcggaagttgaagcacttgaaacaccgcaaatcggcattgaagacttcgacaaaatcgatcttcgtgttgcagaagtaaaacaagtagataaagtgaaaaaagcagataaacttctttgtttccaattagatttaggagaaggaaaactacgccaagtgctttcaggcattgccgaattctatcaaccagaagaactaatcggcaaaaaagttatcgtcgtttctaacttaaaacctgtgaaacttcgcggactaatgagcgaaggaatgattctctcaggcgaaaaagatggcaagctaagcgtaattgaagcaagtagcgcacttccaaatggtgcgaaagtaaaatagtaaaaacgagtcctaattcacttgaattagggctcatttttttcgtttaaaaaaactttaaaaaaaagattgcatattgcaaacgattacaatataatgtaactatacttacttaattcattgaacgaagtaagttgtcagccagaagtaaaggagcttgaaaatggatatcttaagaaaagggaataaagatttaattaaagacataaaccgctatacagtactgaatttaatccgtgaaaaaggagaaatcacgcggactgagatagccaaaaaatgcgattttgggatgtctacattaacgtatattttagatgatttacagcaagaaggcattattttggaaggtgccgaaacatcatctactggaggcagacgtgccaagctagtcagatttaataaagattatggatttgttgttagtgtcaaagtagaagaggaacaacttctttttgcgttgactgatttaaatgcagaaatcattgaaaatacttctataccattttcttcagagaaaaaaccagaagaagcaattgagttgattgctaaaaatgtgaaaaagatgtgtggaaacagagatatgaaccatttgctaggagttggaattgcgatttccggtctagttaatcgtaaaaaaggaacagttatccgctctactatgttagggtgggaaaatgtcgctttagaagcaatgctacatgctcactttccagatattccagtgtatgtagataaaaatataaactgctacacacttgcagaactgtggttaggtgaagggaaacaatcaaataattttgccacagtttccgttggagctggacttggtttatctgttgttattaatcgccaaatttattacggtgcacaaggtggagctggtgaattcggacatacaacgattcagccaggtggatacaaatgtcactgtggtcaaaaaggatgcttagaaatgtacgcatccgaattttatttccgaaatcgtggcgaagaattaaaagaagcatatcccacatcagaattaaatgattttcattttgataaagtggcgaaaagtgctcgagctggagacgaaatggcgacggaacttatgggtaaaatgggtgaatatttaggatacgggattcgaaatatcatcaatactttcaacccagaaaaagttatcattgtcggtgaaggtttgcatcatagagacttattcttaactaaaattgatgaaattgcttcacaaaactttttttcaggggctggctttgaaacggaaattactacaacttctttagaggatcctgcatggttacaaggtgcggctttactagtcattcaccaattattccaagtgccaatctatgaagaagaacaaactttactacgttaaaaagtacataaactatttcaggaggttatttttacatggttggtatgactagaaagaaaacactcttttggctatgcatattcttgctacccaatttactaggttttctcatttttattgcaatcccaatccttggctcgcttggtattagttttaccgattgggacttagtgagtacgattcactttactggatttgaaaattacaaaaggctatttaatgacccagaattttggaaatcgtttagaaatacaatcacgttcatcatcggttatttaccaagtgtaatgattcttggtcttgcgtgtgccttgatgttaaaccaaaaaattaaactaagaccatttttccgagcagtgtacttcttacccgtgatcacttcatgggtagctgtttcactcgtttggaaatggcttttcaacccttcgtacggtctgatcaattacttcttatctttaattggtattgcaggaccaaactggttaactgatccacaaacggcgatgatcgctgtgattattaccagtgcgtggaaagatattggtttcgttatggtattattccttggtggtttgcaaaatatttcaccatcttactacgaagctgccaatatggacggagcgtcaaaacttcgccaattattctctattaccatcccacttcttactccaaccacattctttgtgacgataatatctcttatcaactcgttccaggtgtttgaccaagtgatgattatgactgaaggtggtccaagtggagcgacgatgaccttagtccaaaatatttacaaccatgcatttagatacttcgaaatgggctatgcttccgcgatgagttggatattgtttattgttattttcatcattacaattattcaaaataaacttcaaaaaaggtggtccaattactaatgaaaacagaaaaaagtggttcaccaaaatggcaactattcaaaaatattcttacctatacaatcatctgtcttggtgggattatcatgcttatgccatttgtctggatggtatcaactgcattcaaaacaggcgcagcgaatatggtattaccaccacaatttattcctaaagaaccgacaactgcgaacttcactcaagtatttgaaatgttcccaatgttgcgatttttagttaactccgtgatagttgcagttgtaacaacactcggtcaaatgctgttttgttcaatggcagcgtatgcatttgccagaattcctttctggggtcgcgataaactatttttactttacttggcaacaatgatggtaccggctcaggttacgatgattccacaatttatcttgatgaaacaatttggctggttagattcttatgcaggtttgattgtaccagcattattcagcgtttttggtacatttttattacgtcaagcattcatgggaattccgaaagaattagaagaagctgcatttatggatggagcaaatcattttactattttccgaaaagttatcttgccgcttgcaaaacctacatttgcgacacttggaattttaacttttatgcaatcttggaacagttatttatggccattaatcgtgacaagttcacaagaaatggcaactttacctttaggattatctcttttacaaggtagatatggcacgaattacggcttaatgatggcgggagttcttattagtgttatcccgattttagcagtgtacctttttgctcaaaaatatttcatccaaggaatggcaatgagcggaatgaaagaataaaaaaccaacaaaaaaggagtgttacaaatgaaaaaaggtttattattgttaatggtagttgtactgtctgtatttggtctttcggcttgcggcggtggcagtagtagtggcgataaaacagaaattacgtattatcaattctctgcaccagctgatggaaaagcacttgatgaaatggtaaaagaatttgaaaagcaaaacccagatattaaagtaaacgttcaaacaatcgcatttaatgattacttcacgaagctgcaaacgcaaatcgcaggtggagatgctcctgatgcttttgaacttaactatgaaacattcatgcaatatgctgaaaaaggtgtacttgcagatttaacaagctatatcgaaaaagataaagattttgatccatctacgcttaacaaacaagcctacgatgctttcaaatatgacggtaaacaatacggcatggtagaaagtttctccaacgttgtaacaatttacaataaagacctttttgataaagccggcgttgaatacccgacagctgactggacttggaaagacgaagaagcggcagcgaaaaaattaacagatgctaaaaataaagtttggggaacttcccaaccagtaacaatgaacgaattctacaaagtagcagcgcaaaatggtggttcgattttcaatgaagatttaacggaaacaactattaacagccctgaaaatgtggaagcactgactcacttaacaaatgaagtaactgattcaaaagttgcgccttcaccagctgatttatctggacaattaccagaagatttattcatgaatggtcaaattgcaatgcttcacacaggtatttggttgttcgatatgttccaagatgctccgttcaaatgggatgtacaagtagaagcaggtaacacacaaaaagcaacccacttcttcgcgaacggaattggtgtttctaaagactccgataaaaaagaagctgcattcaaatttgcttccttcatgagtgcgaacgaagaagcagcaaaaatcagaattgataataactgggaacttccagcaacagaaaacaaagaaattctacaaccatatttagatgcaactcctccagataatagagaagcggtattcgaatctctacaatatatggtattacctccagttgtgaaagattggaacaaaatcagtgattatacaaactctgaattcgaaaaagtattaaatggcgattctaccccagaaaaagcactgaaaaacagtgaagacaacatcaacaaaacaatgggatttaaataagtaaaacgagtggcagggacgtttgtaagtatctttacaaattagactgccactttagtatatccaagaaaggaaatagaacatgtctaaattcacaaaattaatgcagggttacttgcatttaatagaaggaaaaaacgaaaaaatcaaaccaatcctcctggaaacaaaacctaactttacaactgattcagtccttgaaaccgcttcttggctatggcttagcagtaaaatcaaccattatgatagagaagaagtagagccagtaattgcatttttagttgaaaactggaatcgtcctgaaaagtctatttggggttcagctgaaaatgatatttatttagcaactatttcaagtgtatactctgcattattagatgtgaaaaacacttttccaaaaccggagttacaacaaacgattacaattatccgcgactattgttttgataatttattaaaaggcgatagcattcttactggttttaacacgcggaaagtgtcaaccgaccagcttttatccgtgcttccgtttggtctattttcgcctgaagatcttgtaatggtggcggctgttggcaaaatggaacaacaattagtgcaagatgatggggtattgccttattcaggagcaccaagagttaattcctttgcaacggctctaatggcgctatatttcttagaaaaaagtgaccaagataaagctttacactatttgaatatggcaatgaagatggaagataatgacgaacttggcgcgatttttattgaaattaaccaagcattccgggcgatggaaagtgaagtgacagcgcatatttcacacgatccttttgggcatgaaaatcgctatgagcaacagttaactgaacgcacgccacattatcccgaaacagaaatgcatttttcggctgcgtgtgaagttatttctgaagtcgaaccaatccaagtcgaacttgtattaaaagaaaaagactggaccattttatgtgagaaaaaagagaaaaatgatgtccaaatctgggaagcgctcgttccaccgttagaagaagttggcgagtatacgtattatttccaggcgacaatgaaagaccaaaccactttgacatcagatgattataaagtcgaaccaatttggaaacactggtcagaagaagcagcaatttgcgaaacagagcaaggtttaatggttttatttaaagaaaatccatcaagtatcatcccggtcgagttcaccgtgaaatcagatgaacttgtaatcgggttaaaaccttcgtttgaagcgagcaatgttaaaacaaaatcatccggccaattaaaaaaagatgatttagagattatcgtttcaaacaatccagtgcgtctcgaagtacactttaaaggcaaattaattctagaatcccataaaatttacccagcgttacaatggtataccgataaaactggcacaatcaacaaagttaaactgcatttagatgcgccaaaagaagaagagtattacggcttcggtgaacgctacaatgcattaggtcagcgcgggaatgtgcttgattgctttgtttataatcagtaccgcgatcaaggaacaagaacctacatcccgatgccgttttatcacacgaatcgtgattatagtgtgttcgttgataccgctcgttacacaagttttgatttaggtaaccaattagcggacaagcatacaattacagtagaaataaatggctgcgatacagatatctgtcttttaatgggagatattcgtagtgcagtagctaattatatgaaaaaaactgggaagcctgcgatggttccagtttgggcgcttggaccgtggatgtctagtaataactgggaccgcgaatctgtcgttcgaaatgaagtagaaacaacgcaagaattgcaaatcccatcaaccgttgtcgtgctagaacaatggagcgatgaagcgacctattatatgttcaatgacgccgaatatgacgaaaaagcaccatccgaagcatattcctacgatgaaattagattcccttcatggggcagatggccagatccaaaaggaatggttgactacattcatgacaataaaatgaaattaattctttggcaaattccgattcaaaaatacttaaaccgtcaacaacacccactaaaagaccgcgaagaagcctatatgattgaaaaaggctacgtcgttaaaaatccagatggctcgccgtaccgtattccagaaaactggttcacagaaagcttgataatggatttctccaatgaagaaggcaaaaaatggtggtttgataaacgacaatatttgattgatattggcgttgatggctttaaaacagacggcggcgaattcgtttttggagaaggattgcagtttgctgatggtagacgtggcgatgaaatgcgtaatctttatccaaatgactatgtggaagcttattatcaatttgcgcaacaaaatgagggcatgacatttagtcgcgctggctatactggtgcacaaaacttcccggctcactgggctggagacgaacgttccacttttgatgcgtttagaagatcgctcattgctggactttcagctggattttctggaattccgttttggagctttgattttgcaggctttaacggtgacatcccaacggccgagctattcattcgttctgctgaaatggctactttctgcccaattatgcagtatcatgctgaaagtaaagcggaatttaatcaagaccggacaccgtggaacattgcttcacggactggtgacgactcggttatccctatttatcgccatttcgcgaatgttagaatgaatattttaccttatatttataacgaatcattaaaatgtgttgaaactggcttgccgatgatgcgtgcgcttttgttggattataaagaagatccacgtgtttctgatatgtatgaccaatacttattcggggaagcgatgctgattgcaccagtaattgaagacggcgtgcgctcgagagaagtttatctgccagaaggaacttggtatgatttctggaatggaacaaaagtgagcggaccaactttacgcaaatgtaaagcggataaagaagaaattccagttttcgtccgtggtggaaaagcagtactatgtaatgtagacgctacgttgaaacttggctcatgggttggaaataccgttgaagagtacgatactccactactaaaagtctatttagacggagatttcacagaagaaattaccgatcatttattcggaaaatggctagtgaaagtaaccgagaatgcggatgaagtaatcgtttctgttcaaacaaatacggcttcctatgaagttgaagtaatcggcacaaccaaaaaagtacaaataaagaaaggaagataacgatggatgcttccacaagttttgcgattctaccatctaatgtaaaacaaaaaacagctttcgaaagaaaagtaaatcaagtgaaagcggctagttggacgaataattgcctgactggtacgcttgatatcggtcagttcagctgctattttgttaatgaaaaaattgcccgcgtgacggtgaacccgtttggagaagtggatttaacgccttcgattgcggcaattcatgataacgaaaaacaagctgcaaaattcacggaaactaatgactgctatgagcttcatttcgcggataaagaggttatcgtttgtaaaaatcctttccaaattattatgaagcaagcagggaagcgtatcttccaaacagaaggcctggcaattaatcgcgacaaagaacaccaaatttctattcaaagcgaaccaggaaccgcgatttttggcttaggtgaaaaaacgggagctttaaacaaagctggctccattattagtatgtggaacacggatgtatacagtccacataataaagatacagtggaattatatcagtctattccttttatgattgcggacactgcaaaaacaacatatggcttattttatgataattcgcaccgtacagaatttgattttcaaagttttgaagaaatgtataccgtcttagcagaaggcgggcaagcgaatctttatattatttttggcgaagatgtaaaagaagttgtcgcgaattataccgatttaactgggaaaacgccacttccgcctaaatggtcgttaggttatcatcagtcgcgatacagctacacctcggaagaagaagtggaacggattgcgaatacgtttaaagaaaaggagattccgctcgactgcgtattcatggacatacattatatggatgatttccgcgtgttcacttttaatccggatacttttccgaatggtccagaattaattgcgcgtcttcgcgaacaaaatattgacgttgtgccgattgttgatccgggaattaaaaaagatgtcgattattccgtttaccaagagggcatcaaaaacaattatttctgcactaaactagaagggtcgatttattatggtgatgtttggccgggtgtcagtgcttttcctgatttcctaagtacgaccgttcagcattggtggggcagtttgcacaagttttacacagatttaggtatacgagggatttggaatgatatgaatgagccgtctgtatttaatgaaagtaaaacgatggatttagatgttgtgcataatctagacgggaaaaatgtgacccataaagaagcacataatttatacggattatatatgagtaaagctacttttgaaggtttaaaacgacttgtgccaaatgaacgtccattttcgcttactcgtgctggttatgcgggtgttcagcgttattcggcggtttggacaggagataatcgtagtcactgggagcatttagaaatgtcgctaccgatgattatgaatttaggattgtcgggcgttgcgtttaccggtgccgatgttggcggattttcttcggattgtacgaaagaaatgttgattcgctggacgcaagccggtgcctttttaccatatttcagaaatcactgtgtccaagatagcatttaccaagagccatgggcttttggtgcggacgcagagaaaattgtgaagcaatatattgaattgcgctatgcctttttaccgtatatttatacagaattccaaaaaacggcagagagtggtttgccgctcgttcggccactttatatggaatttaaagatgaacgcgatttaattcaagtaaacgatcaatttatgcttggtgaaaatatcctcgttgcgccaatcgttcgcgaaggccaagcgaagcgcctagttcgtttaccaaaagggctttggtttaattattggacaaaagagcagttcgtgggcggcgactatattatcgcagacgcgccgattgataccatgccaatttacattaaagcaggaacaattctgccagttggtagcagcgttcaaaatacaaaagagacgcaagaattgacattagaagtttacttagacagtgagacagcaactggttacgtgtataatgatgatgggaaaagttaccaatatgaaagtggcgcagtatccaaaacaacactcacagctactttcaaaaatggcgaagtactaataaatgctacccatcaaggtgaagcaaacttgcagcaaaaagtaactactatacaagtgtttggagaaaaaatagacaaaattacaagggcgggaatttaatcgatgaaagaaaaagattggtggaaaaaaagcgtagtgtaccaaatctatccaaagagttttaatgattcgaatggtgatggagttggtgatattcaaggaattatcgagaaattagattatttaaaagagcttggtgtagacgttatctggttgtccccggtgtacgattcgccgcaagatgacaatggttacgatattcgcgattatcaaaaaatttacgaagaatatggtgacatggcgacttttgatcaattgcttcaaggtttacacgaccgcgatatgaaactcgtgatggacttagttgttaaccatacttctgatgaacataagtggtttgaagaatctcggaaatccaaagataacccatatcgcgattactatttctggcgcgaggaaaacgaaatcaacaactggggttccattttcagcggtccagcatgggaattagacgaaaaaacaggcgagtactatttacacctgttctccaaaaaacaacctgatttaaactgggaaaaccctaaattacgccaagatgtatataatatgatgaaattctggctagataaaggcattgatggtttccgcatggacgtaattaattttatttccaaaaacaccgatttcccagatggtccagtgccagatggtcaaatttacggcgatgctggcaatgatttctgcaatggaccgcggattcatgagttcttgcaagaaatgaaccaagaagttacttccaaatacgatgtgatgactgttggtgaaatgcctggtgctagtacaactgacgcgcagatttatacgaatccagcaaataacgaagtcgatatgatttttacatttgaacatatgaacttagattccgatagcgacaataaatgggatttgaaaccaatttacttaccagatttaaaagaaaacatgtccgaatggcaagtggcgcttcaagaaaatggctggaacagcttatactggaacaatcatgaccaaccacgaatcgtttctcgcttcggaaatgacaatcgtttccgcgttcgttcagcgaaaatgctcgcaacttgtctgcatatgatgaaaggaacgccgtacatttatcaaggtgaagaaatcgggatgacgaatgttcattttgaaacgctagatgattatcgtgatatcgaaacgctaaacatgtacaaagaacgcaaagagcaaggccacagtcacgaaagtatcatgcagtcgatttacacaaaaggtcgcgacaatgcgagaaccccttatcagtgggataatagcgagaatgctggcttcacaaccggaacgccttggcttaaagtcaacccgcgctatacagaaatcaacaacgaagaagcgctgaaaaacccagattccattttctactactaccaaaatcttattaagttacgaaaaacgactgaaatcatcacaacaggtaattatcgcctgttattacctaaagatgaagcgattttcgcatatgaacgctacacagaaaatgaaaaattagttgttttatgtaatttcacagaagaagaacaagttatttctgatgaaaccattttgaacgaaatccaaaaaggttccgttcttgtaaacaatgttcctaatattatagaaggaactttacgaccttacgaagcaatcgtttatcaaatcaagtaaatctcaggaaagccaccatttgctaggtggctttttttgtatgcatcaaaaattatagtataatagaaggaaatgattttattaggaggaattctcttgctatttgatacgcatgtacaccttaatgacgaggcttttgatgatgatatagaagaagtaataaaacgcgcgcaggaaaacgatgtgactcgtatggccgtggtgggctttaataaagaaacaattgaccgggcgcttgaattagcggagaaatatgattttatctcattaatcgtcggctggcatcccacagacgctattacctttacagacgaagatttagaatggcttcgtgatttagcactgacacacccaaaagtagttgctttaggcgaaatgggcttagattatcactgggatacttcgccaaaagaaacgcaattcgaggtttttagaaaacaaatccgtttagcgaaagaagtgaatttaccgatagttattcacaaccgcgaagcaacggaagatgttgttcgtattttgcaagaagaacacgccgaagaagtaggcggaattatgcattgttttggtgaaactgtcgaagtaatggaagcatgcttagcgatgaatttttacatttcgttcggtggaacagtcacttttaaaaacgcaaaattaccgaaaattgcagcccaagctataccaattgaccgtttattaattgaaactgacgcaccttatctcgctccgaccccaaatcgtggaaaaagaaatgaacctggatacgtcaagttagttgccgaaaaaattgcagaactgaaagaaatgaaatatagcgaaatcgctacgcactcaacggaaaacgcgaaaagactatttagaatcaaagactaattgtaacatgattgtaatataaggcccagtctgtaacccaatcttaagcttcgcggagataaaaatcgtgactgggacaaaaacccttattttatgcctacgaccagagacgtagaaaaatgacacatttctgttacatttgacactttaaaagaatgttacatttaaaaacggctttatatcaacgtttatccaataagtttgcgaaaatatgaacaatctatataaaaaattgacagttcttccctcccctgtatataatcactagcgaagtagaaaggggagaaatacatgaccatggaaaacagcagtaacgtagcccaatcatcaaaatggaaattaccaatcatgattgcaggatttgttattgtagtagcattggttttttatttcgttttcgaaggaactaaaaacgatatcactatagtaaacgctggtgaaaaaattgaatcaagaacacatgcgaaaactgtttcagaagcattagacgaagcaggcattaaagtaagtgaacgcgatgaaattgcaccaggcaaaaatgcagaaatcaaagacggcatggaaattaaatatttgccagctcgtcaaattacaataaatgataatggtactaaaaaagacgtttggagtacaaaagcaaacgtagcagacttgcttaaagatgaaaacattacaactcgtccgcaagatgtattaaacgtagcattagatactaaattgaaaaatggtcttgaagtgaacattaatcgtgccattcaactttccttacaaaacggagcaaaaaaagatacagtatggacaacaaaaacaaaagttagtgatttactagctgagaaaaatattaaacttgatcaagatgaccgtgtgtcacctgcgaaagacagtaacttaaaggaaaaaatgactgtagaagttacatatgtcaattcaaaagcagaaaagaaaaatgaacaagttaaattcgaaacagtatacaaagaagacgatagcctaaacaaaggcgttgaaaaagtcgttcaagaaggtaaaaacggcaaaaaagttgttgagtataaagtaacatttgaaaatggcaaagagaaaaaacgcgatgtcattaaagaaaatgttacttctaataaaactgataaagtagttgtacgcggcacgaaagaaaaagtggttgcaacaccagtttctaacgtatccacttcaagtgcaacgtcttcatcatcgtcatcagcatcatcaactccatcaggtggtaaaacatacaaaatggaatctactgcatattcaggtggcggtactacagcttatggtatcaacctaagtgctaaccctggactaaaagtaattgcggttgatccacgaattattccacttggctctaaagtttgggttgaaggatacggagaagcaatcgctggagatactggcggcgctatcaaaggaaatatcgttgatgtgtatttcccaaatgaaagtcagtgctattcatggggtagaagaatggtgactgtcaaagtattaaactaaattcgtataaaaacgaggctgactcatagggcctcgttttttctttgtccaaaatgtggtatgatgtatttacttattttataaaaaaggatgtagtaattatgagcgggaagcctgtaatacatgaatttatagtcgtagaaggacgggacgatacaacggcaattaatcgttcagttattgccgataccattgagactaatggatctgccctttcacaagaaacaatagaaaaaattagacatgcgcaagaacttcgcggcgttattatttttacagatccagattttccaggtgaaaaaatccgaaaacaaattgactcagcggtaccaggctgtaaacacgcttttatcaatcgccaagatgctttaccaaaagctggtcgcggccttggagtggaacatgccagtagcgctaatattcgtgaagcattagaaaacttccatacgagtggggcgcccactgaaaaacaatttatttccaaagatattcttgttcatctcggtcttcttggaggagtgggagcgaaagaacgccgagaaaaaatcggaaatatactaaaaattggttatacaaacggaaaacaactacaaaccagactagaatcatttgcaatcagtgaagaacagttagtagccgcgtgccaaaagattatgcaggaggaagaaaatgagtaaagatattgcaactcccggaagaacgacagaaatcctaaagaagtatggtttcttatttaaaaaaagtcttggtcaaaactttttaatcgacagtaatattttgacgcggattacagatacagccgaaataacaaaagaaacaaacgtcatcgaaatcggaccgggtatcggcgcgctaacagaacaattagccaaaacagcgaatgaagtcgttgcttttgaaattgatcaacgtttactgccaattcttgatgatacactgagtgcttacaataatgtcaaagtagtccacggagacgtgctaaaagcagatgtagaagaagtcatcgcagagcaattcgcgaagccagaactaccactaaaaatcgtagcaaaccttccgtattacgtaaccacaccaattattttaaaacttctacacgataatatcccggcagattcgatgacatttatgcttcaaaaagaagttgcggaccggataagtgcagttccaagtacgaaaagctacggaagcctaacaatcgctatccaattttacatggaagcagaactagcctttatcgtgccaaaaaccgtctttatgccacaaccaaatgttgattccgcagtaattcatctgaagcgtcgcaaagaaccattagctgaagtgaacgacgaagaatttttctttgaagtaacaagagcttcgtttgctcaaagaagaaaaacgctttggaataacttagcttcaaaatttccagctttaaaaccgcgcaaagacgagttggtagaaggtttaaatgccattggtatagacttaatccgtcgtggagaaacgttggatattccggaatttgctaaattaagcaactttttaggtgattttttaaaggaaaaataatttttttcaaaaaaagcgctttcttagttgacagttagcccttccaactgttaaaatatttggttattgatttcggagccgaactatgctataatggatattagtgaggtggaaaataaatgccaaaaaccattgcaagcattaagacgaatttagattctagattaggtaaagcattgacattgaaagcaaacggtggtcgtaagaaaacgattgaacgttgcggtatcctagctgaaacatatccatccgttttcattgtggagcttgatcaagatgaaaacaactttgaaagagtatcctatagttacacggatatcttaacagacgcagtagaacttgtatttacagatgataataaagaattagctttataatgaagctgaagtagccggaccatatagcgtggttcggtttttgctatacatagaagttgttttgggccgctagctacatattttttctttcatatgatagaatagaaaaagagattttgaacgcggaggccaagaaaaatgaaaataagcattacagcaccagctaaaattaatctttcacttgatgcgctgtacaaacgtgaggatggctatcatgaagtggaaatggtgatgacaacaatcgaccttgctgatagattatacttagaacgcttagacgaagacaaaattgtgctggatgtaaaagcgcactttattccagaagatcgtcgcaatttaatttatcaagcggccctccttttaaagaagcgttttgacgtaaagatgggtgtgcgcattacaattgataagcatattcctgtttctgcgggacttgctggtggtagttcagatgcagctgcagcgctcaaaggattaaatgtcatttgggaacttggtctttcaatagaagaattagccgaaattagttcagaaattggttctgatatcgctttttgcgtatacggcggaacagcgctagcaactggacgcggggagaaaatttctgcgttacctaatattcctggttgttggattgtacttgctaagccgagcattagcgtgtcaacacccactatctataaagaacttcaagtagacaatgtagaacacccagacacacaaaaaatgattgaatccatcaaaaatggtgatctagacgggatttttgcggctacagggaatgtgctagagtctgtgacattagaaaaaaatccgcaagttaaacgaataaaagatcggatgttagcgtttggtgctgaggcggctctaatgagtggtagcggtccgacagtgtttgcgcttatcaaacagtactccagagcaaaacgtgtctataacggcttgcgtggcttttgtgaggaagtttatatggttagaccatggagtgaaggcgagaacgatacaaatataaattattaatgaatgagaggggtcaaagaaatgaaaattatttttaatgcagatgattttgggattagcccgggagcagtttatggtattttagagtcgtataagcgaggcgttgtgaaatctaccacgcttcttgctaatagcccggcatttgatttggcagtagaagtagcgaaagaaaacccaggtctcgatattggtgcacatttgactctgacatttggctctcctgttcttcaagggttagaaacgttaacggatgatgatgggcgtttccgcagaaattatacctcacttgaaaacggcttagctgatgtagatatgaatgaggtggagcgcgagttaactgcgcaaatcgagaaaattctagatgcaggaattactatttctcattttgatacacatcattcgattgagccgctaatttatcccgtgcaacataaactagcagaaaaatacggtgtgagcattcgacgtcattctgatgtttcggatttcggtgctataaaaactcctgatttgttcgctacggagttttatgcagacggtgtatcttttgaaacgattaaaaaattagtgcaaaagcatattgggacgaatgacgtagtcgaagtgatgactcatccagcatttattgatgaaacattgcgcgaaatatctagttacgtagagccacgcatcaaagaagtttcaattctaacttcaagagaactacaagcatatttaggccaacaggaagtagagattattagtttccgtgatttataagagcatgaacctgtcaaaggatgtttatttggcaggttttttattacgttaaaataataaatgttgtcaattttatagaaaacgttttataatagagaaaatacggacaaaatacgtgaaatagctttttaatatacggaattttatcaaagggagagagattatgaagattcgtcgcagtgaacgattaattgatatgacgcagtttctattatcgcatccgcgaaagttagtgccgcttacgatgtttgctgaacgttatggctcagctaagtcttctattagtgaagatttggtcatcataaagaaaacatttgaagatagagggattggtacgctcgagactgttccaggtgctgctggtggtgtgcaatacatttcgatagcgggaaatgacgatgtgctggattttgtgcatacgctatgtaatagaattgcggaaccaaaccgtttgcttccagggggctatttgtacttatctgacctacttggagaaccagtaacgctcaaagcaattggtaaaattttagcaacgaaattcaataaccaaaaaatagatgcgattatgactgttgcgactaagggtattccgattgcgcaagcggttgctgaacatttaagcgtcccatttgttatcgtacgtcgtgatagcaaagtgacagaaggctcaaccgtaagcattaactatgtttcaggctcatccaaacgaatcgaaaaaatggaattatccaaacgaagcttagctgaaggctctaacgtagtaatcgtggatgattttatgaaagctggaggaacaatcaatggcatgaaaaatctgctagaagaattcaacgcgcatttagttggaattggtgtgttagttgaatccgaatatgcggaagagcgcttagtggatgattacgtatctcttgtaaaaataaaaaatgtgaacatgaaagaaaaacaaatcgaagttgttgatgggaattactttaatagttgattctaaaccctggaaaaatattctggggtttttcttttttgaaacgaattgctactaaaaacaaatcagccctccgatgtacttcactcagttaacttttgtggtagaatgaattctatcgttgctacataaaattcaaggcttctagacattaggagcagaaggagaacattcatgaaaaaatgggttaaatggttaattgttatcgttattatcgcagtagtagccgttggtgcggttttcttgctgtcgaaaaatagtggctccgtaacacaagaaaaattagttacagccaaagtaaaacaaggagatatgaaaatcaatgctacaggaacaggcgcgatttctccggtaaacacacaagttccagattacgatgaacttcaattagtagcgcaaatggacgaacttgatattcctaacatcaagaaagaccaagaagtaaaagtcacagtaacagcattacctgacaaaacttatacaggaaaagtgaaagaaatcgcagaacaaggtcaagtccaaaatggtgtgtctagcttctccgtaatcatttctcttgataaaacagacgacttaaaagcgggtatgactgctgatgcttccattttagtaaatgagaaaaaagatgcgctatacgttccaattgaagctgttcaaaaagacagtgacgacaaatattacgtattagtcccagaagaaaaagacaatgggaaaacgaaaaaagtgaagaaatttgtagaaactggtcttcataatgaagataatatcgaaatcactaaaggtgttaaaaaaggcgaaaaagtaatccttcctacacaagaaacttctacggttcctggtgctccaagctaagttttttgtaagtacaaattagacaaattgtatgaaggagggataaacatgccaaaaccgctaattgacatgaaaaatttaacgaaaacatatacgctaggcggagaaacttttaaagcattagacgatgttacttttaccgttgagcaaggcgagtttttatccatcgttggtccgtccggttccggtaaatctactttaatgaatatgattggctgtttggacgttccggatgaaggcagctatcaccttgatgatgtagatgtttttaaactgagcgataataaactatccgaaatcagaaataaaaaaatcggctttatttttcagcagtttaatttgcttccaaaattatctgcctttgaaaacgtggaactaccactaatttatgcaggactaagtgtttctgcacgagaaaaagccgcaatcgaatgtttggaaaaagtaggcttacttgaaaagcgtagaaacttaccaacgcaactttctggtggacagcagcaacgtgttgctatcgctagagcacttgctggtaaaccgcaaattttgctagcagatgagccaactggtgcgcttgattcgaaaactggtaaagaagtaatggggatcctgcaagaattgaatcgcgctggaaacaccattgttatgattacacatgatccaactatcgcctcttacggtacaagaagtatccgtattcaagatggtaaattattccatgaggaggcgacccaagcatgaacgttctccaaagtatgaaaatggcatggaaacaattaaaggcaagtaaattaaggtcttttctaaccatgctaggtattattattggtgtcgcatctgttattcttttagtatctcttggaaatggtgtgacgcaagaagttgatgatcaaatgggcgatttgggttcgaatttaattacagtagttaatagctctgttaatccaaacgacaaatatacgtatgatgaagtaatgaaatatcaaaacattgatggagtcaaaagcgtttctccagaattatctggacaagtcaatgcaacttttgattataagaattcaagtaataaggtgataggcacgaatgaccaatataaggccgcgcgtagcctagaaatgaaagaagggcgtttcctactaccgattgataccgaatatggccagaaagtagctgtaataggctctacggtagcaagtgatctatttggttttggggatccgattggcgaaaccattagattaaacggaatgccttacaaagttgttggtgtcttgaaagaaaaaggcgcgtctatgatgggatcgagcgatgatcaaatctttattccgatttcttccgctcaaaggctcttaaaagatacgaacgttcgtacaatttatgtagaaacaaaatctgctgaagatgttgattttgtagtaaacacattagaatcacgtcttgcaattaaatttggcgacgaaaaagaacaagaaaaaaatgcttcatctgcacaaatgggaccatcttatcaagtcatcaatcaacaagagattctcaatgctttcaacacgattagtacaaccctaactactgcgcttggtgcgattgctgccatttcgcttgttgttggtggtattggaattatgaatattatgctagtttctgttagtgagcgaacgagagagattggtataagaaaagcgctcggagctaaaaaacgggccattctgttacaattcctaattgaatccattgttattagtgtctgtggtggggttatcggtattattatcggtgtctcaggagcgctcatatttggctccgtcgcaggtatatcgtcaggaataactgcaggaaccattatattctccttcgtattctcactatgtattggagtgatatttggtatcgcacctgctaataaagcttcgaaattaagaccaattgacgcattaagatccgagtaaataaaaagaagcccgaaatgagctgtttcgggcttctttttttactaaaattagcggctaagttgtcttgtcatctatatttaatctttttgtcacaattaaacgctttcaatagccagttttggtaaaaaatttagaataaaaataaaattaattctcgcaacgtgcattagaatggggttttgggggaatatagtctctgttggttaattagcttaaatggtttagagaagtataaaaatgtaaatatatgagctctgtaaactcataaatcctatagatattgtatacaattatcttcgaaaaatgataaatcaaataccgttttactggtgttattgtctgcaaaatagtatgatgattacagattgatactgtgatggcaatggttttgaagtttttatacgtataatgataattattgtatacaaaacaaaaactagaaggaacaatctgtaaaagtcaacgattttcaaaaaaaaaaacttttttttagattacaattcacaaagttgtcaaatttagttttttttattattatgttcatagggaagaattttacgtgaatattgcttgctttataaaagtaattttttctatgggggaatttttctcgagtgtgtacttaagttgcatgtgagcattgtttactagcagcgcaactagattaaggtggtgaagataatggagattacagatgtgagattacgacgtgttgagacagatgggagaatgaaagctatttcttcaataacgattgacggtgagtttgttattcacgacattcgtgtcatcgatggcaacgagggattgttcgtagctatgcctagtaaacgtacgccggatggtgagtttagagatatcgctcatccaattaactcaggcacccgtgcaaaaattcaagaagccgttttagctgcttatgaagtagcggacgaaccagcagtaaacgaagaaagttctgcagacgaaagtattgtagaagaaaactaaaaaaatcctcggttagggagaacgttgttgggaacagttgggggataaatacctaagattttagctgggataagcagattctttttgaaagaggcaaatgggataaggagtgactaataatgcaagtaacagatgtgagattacgtcgtgtagaaactgatggaagaatgagagcgattgcttcaatcactttagatgaggaatttgtagttcatgatattcgcgttattgatgggaataacggtttattcgtagctatgccaagtaaacgtggtgttgacggtgaattccgtgatatcgctcacccaattaattccgacactcgtgcaaaaattcaagaagtagttttagctgaatatgagcgcgttggtgaagaagaagcgactgcggtaacagaagaagaatctgaatccgtttctgctgaataatttaaaattttcaagggctggcttagtgccagccctttttgtgtggaagaagcatgaaaaaaatcataaatagccttggtcttctattttggctatggtataattaatagcagattataaaacagggaggagaattttaaatgatgttgcaaaaacaggtccattttagaaattttttttgtagcatacgtgtcaattcttcttttagtaagcaaataaataatcatactatatctttcggaattttcaaacaaataaaactttaaattgaatctttacctaaaaaaagtaggtaaggttttttatttgggtgcattcttgaaaaaatgtaaattttacgttatcattcatagtggatgaatagtgaatattggaggttctatataatgtcaaaacgatatgctgtagtgcttgctgctggccaaggcacacggatgaaatcaaaactttacaaagtattgcatcctgtttgtggaaaaccaatggtcgaacatgtagtagatcaaatttcaacgcttaatgttgataaagtggttacgattgtaggtcatggagctgagaaagtacaagagcatttagcaggtaaaagcgagtttgtaaaacaagatgaacaacttggaacggcacatgcggtacttcaagcgaaagcagaacttgcaggtaaagacggtgtgactctagttgtttgtggggacacacctttgatcgaagctagcacgatggaagctttacttaaatatcaccacgaaaaacgtgcaaaagcaactattcttacaacagttattgaagatcctacaggttacggtcgtattattcgtgatgacctaggcattgtagaaaaaatcgtagaacataaagatgcaacagaaaaagaacaacgtatttcagaaattaacactggaacatattgctttgacaataaagctctttttgaagcgttagagaatgtttctaacgataatgtgcaaggagaatattacttaccagatgttattaaaattttaaaagattcggatgaagtcgttgcggcttacagaatggagtctttcgaagagtcacttggagtgaacgaccgaattgccctagctgaagcgtccaaattaatgcaacgtcgaattaacgaaaatcatatgcgtaatggcgtaacgcttgttaatcctgaaagcacgtatattgatatagatgtaaaaattggtcaagatacagtaattgaacctggagttatgcttcgtgggaaaactgtaatcggcgatgattgtgtggttacaagtggctcggaaatcgtaaacagtgttatcggtgaaagagtgcatgttagaacttcttccattttcgaaagtaaagttggagatgacgttcaaattggtccatatgcccacctaagaccagaatctgacattcacgatcatgtgaaaatcggaaattacgtcgaaacgaaaaaagcagttgttggtgaaggaactaaattaccacatttcatttatatgggagatgcggaaattggtaaaaacgtcaatgttggttgcggaagtattgctgttaattatgatggcaaaaacaaagctaaaaccattattggtgataatgtctttgtaggttgtaattcaaacctgattgcacctgtcaaagtgggcgaccgagctttcatagccgctggttccacaattacaaaagatgttcctgaagatgcgctaggtattgctcgcgcgaaacaagacaacaaacttggttatgcgaaacatttgaatcatagtaaataacttccaattggaaagtttaaaattttaataaaaaatagtggaggctgattatgtcaaacgagtattttgatccaaagttgaagattttctcgctaaattctaatcgtgaactagctgaagagattgcgaaagaagtaggtattgagttagggaaatcaagtgttactcattttagtgatggagaaatccaaattaacattgaagaaagtatccgtggttgtcatgtatatgttattcaatcaacgagtaatcctgtaaaccagaatttaatggaacttttgatcatgattgatgcgttgaaacgcgcttccgcagcaacaattaatattgttatgccttattatggttatgcacgtcaagaccgtaaagcaagaagtcgtgaaccaatcacagcgaaattagtagcaaacttaatcgaaactgctggtgcaactagaatgattacacttgatatgcatgcaccgcaaatccaaggtttctttgatattccaattgatcacttgaacgcagtacgccttctaagtgactatttcagcgaacgtcatttaggcgacgatttagtagtggtttcacctgaccatggtggagttactcgtgcccgtaaaatggctgatcgtttgaaagcgccgattgctattattgataaacgtcgtccgcgtccaaacgtggctgaagtaatgaacatcgttggtaatgtagaaggaaaagtttgtattattattgatgatatcattgatacagctggaacaatcacacttgctgctaaagcattgcgtgaagctggcgcaacaaaagtttacgcatgttgttcgcacccagttctttcaggtccggctatgaaacgtattgaagaatcgccaatcgaaaaattagttgttacaaactccatcgctcttccagaagaaaaatggattgacaaaatggaacaactatctgttgcagctcttcttggtgaagcaatcgtacgcgttcatgaaaatgcttctgtaagttctttattcgaataaaatataaaacagtattcctcattgaggaatactgtttttgatttaatttaattttccccaagtagcaggacatgctaaataaaaccattcatctaatttaggggcatatcttttgagataatcaagattttgtacataaaagcatgaatttttatacacgataactttctcttgctttaatttggaaataattctgctaacagctgagctatgtgcgatgccacttgaatatcctaactcctgcattgttaaattatccagtgtaatcttgatgccatcaggagtttctttaccatacacataggtcaggattaaaagttgaccgcaaatagagccaagcttcccgttaatcgaaaaatcattaaatttagctagactgtatgaaacttgtttttgtagggtttggaaaacatagaaaaagtgcgtaagatttttgctcagtagttcttttagttcgtttattttgataacgtatgcggtagcctgctcgctaatgacttctaaattataatagccaaccgatgtttctgtatcaataaagccagacattataacgaaagcccctttgtagtattgtaaattcatgatggtcccgttctcgctaatactcgtgagctttgtgataccatcatatagaaaaatacaatattcttgtggatcccattggttaaaaataagttcttttttatgaaattgttttggttttatcccgttagtttctaaatattttttgaattcttctgcttgagcgttcatgtctcatcccccaatcgttttttatcgcccttttttaaaataccctaaaaacattaggcagtaacaacaattgttagctgttgaaagaaagtcacgctaaatgatgttttttacatataggattttattatacaaattttgatttcgcaaaagaaatgcatacatatttaaaaacggatttatttagatgttaaaattgaaatagagttagtatatggttccgaggttgctcggagatatactaacccttttttgtaggaataatatatgttagttgaatttattgttttttatgatgtttttaattgtttgtttttcggggaagtccatgattagtatgcctaatcctcgaactttttccgatgttaagttgagtacgaattgctctactttgttgtttaatgctgcagcatactgacgaggtgtgaatgttaatgaagtggcgctaatatggttaagaaaaagtttattgtccgctttggaagcttgataagcagtctggacaatctctttgaattttgttttcacactcggaccattgtagtcatcttgaattacttggttaggtgcgccgaactgcatgccgaatttgcgtgagttaatgactaatggcttttttgtgtggttctctgaaagtaataatatttttccgcggacatcttttaatgtagggattttattgctcgtgtcagttctgggagtagtgtaaaaataatctttataaatgttgattagtggttggatccgataatcaaaactatcgttgctgttttgctcgtcttttaaacgcataataatggtttcttttggatttttctttaaaaattgagtaatcgtttctaatacacctgaaagtgatgcatttaaaaaaattggcccatggtaaatgttgagattgtcttttgctctaatatcgatgtaccgtattcctgcttctagttgttggtacaatgacatcgtttgtgtttgagctagtggtttggttaatgtccatgttatgtctccgttatagctcatcgtatcatgtgtacctggtatagagagcgctgctaggtttgttgtgtcaggtagagcggacatccattgttttgtagttacagagttctttattggcttattccagttattaagcgaatatgcttttccgcctaatgggaaagtaaaaaagtataaaataaaacagagtaataaaactaatgtgcgttgcaaataattcttatacaaaatggccccctcctttgattagtatattcctatcttaaagtgacttttatgttgaggcattaacatttgttaacgacgataaagggacagcaggactagaataaagctataaagcaagcatataatattgcgtttcatctttagaagcgaatttcgccaatattataattatcaaaagagaggggtggcaaacggtatttggcattattaggttaaaaaatgtagaaggagagtgaaacccatgaaaaaaataatgctagtttttattacacttatattagttagtctaccaattgcgcaacaaactgaagcaaaggatgcatctgcattcaataaagaaaattcaatttcatccatggcaccaccagcatctccgcctgcaagtcctaagacgccaatcgaaaagaaacacgcggatgaaatcgataagtatatacaaggattggattacaataaaaacaatgtattagtataccacggagatgcagtgacaaatgtgccgccaagaaaaggttacaaagatggaaatgaatatattgttgtggagaaaaagaagaaatccatcaatcaaaataatgcagacattcaagttgtgaatgcaatttcgagcctaacctatccaggtgctctcgtaaaagcgaattcggaattagtagaaaatcaaccagatgttctccctgtaaaacgtgattcattaacactcagcattgatttgccaggtatgactaatcaagacaataaaatcgttgtaaaaaatgccactaaatcaaacgttaacaacgcagtaaatacattagtggaaagatggaatgaaaaatatgctcaagcttatccaaatgtaagtgcaaaaattgattatgatgacgaaatggcttacagtgaatcacaattaattgcgaaatttggtacagcatttaaagctgtaaataatagcttgaatgtaaacttcggcgcaatcagtgaagggaaaatgcaagaagaagtcattagttttaaacaaatttactataacgtgaatgttaatgaacctacaagaccttccagatttttcggcaaagctgttactaaagagcagttgcaagcgcttggagtgaatgcagaaaatcctcctgcatatatctcaagtgtggcgtatggccgtcaagtttatttgaaattatcaactaattcccatagtactaaagtaaaagctgcttttgatgctgccgtaagcggaaaatctgtctcaggtgatgtagaactaacaaatatcatcaaaaattcttccttcaaagccgtaatttacggaggttccgcaaaagatgaagttcaaatcatcgacggcaacctcggagacttacgcgatattttgaaaaaaggcgctacttttaatcgagaaacaccaggagttcccattgcttatacaacaaacttcctaaaagacaatgaattagctgttattaaaaacaactcagaatatattgaaacaacttcaaaagcttatacagatggaaaaattaacatcgatcactctggaggatacgttgctcaattcaacatttcttgggatgaagtaaattatgatcctgaaggtaacgaaattgttcaacataaaaactggagcgaaaacaataaaagcaagctagctcatttcacatcgtccatctatttgccaggtaacgcgagaaatattaatgtttacgctaaagaatgcactggtttagcttgggaatggtggagaacggtaattgatgaccggaacttaccacttgtgaaaaatagaaatatctccatctggggcaccacgctttatccgaaatatagtaataaagtagataatccaatcgaataattgtaaaagtaataaaaaattaagaataaaaccgcttaacacacacgaaaaaataagcttgttttgcactcttcgtaaattattttgtgaagaatgtagaaacaggcttattttttaatttttttagaagaattaacaaatgtaaaagaatatctgactgtttatccatataatataagcatatcccaaagtttaagccacctatagtttctactgcaaaacgtataatttagttcccacatatactaaaaaacgtgtccttaactctctctgtcagattagttgtaggtggcttaaacttagttttacgaattaaaaaggagcggtgaaatgaaaagtaaacttatttgtatcatcatggtaatagcttttcaggctcatttcactatgacggtaaaagcagattctgtcggggaagaaaaacttcaaaataatacacaagccaaaaagacccctgctgatttaaaagctttgccagattcctgcgaagcaaaagatttttataaaaattttaaaattcttgatatgacaaaagataagctaggcgttacgcattatacgctcgcgctaagttctggtggttacttgaccgataatgatgaaatcaaggtccacgtcacaccggataataaaatcactttcataaatggagatttgcagcaaggacagcttaggattactaatcaaataaaaattacagaaaaaaatgctatcgaaaaagcatttgaagccatcggtcagagtgaagctcatgtgaaaagttatgtcggaaacccagtgaaagaaaaagaaatcatcctcaattccagaacaaaacgcttagtttataatataaaattgatttttgctgagccggaagttgcgagttggattgttcaagtggacgtagaaaccggcgcaattttaaaaaagcaaaatatgctttccgaggtagaacgggctgatacccacaaagattttcaagcgcttggtaaaggagccaaccgattgctccagaggccactacatgttatgaaaattaatgacctattttacttagtggatagaactcataaaggactcataagaacttttgatttaaaacataataccgacacttcgtttgggaaagtggtatcaaataaaacgaatatgtttacggatccagaatttagttccgcagtggatgctcatttttacgcaagtgaagtgtacgaatactataaaaatgtccaccaactagagagtctagatggtaaaggtggagaaattgattcgtttgtccattatggcttgaattgcaataatgccttttgggatggccaagaaattctttatggagatggggacaaaaagaatttcaaaccattttcatgcgccaaaactattgttggtcatgaactaacgcatgcggttatccagtattcggcgggattggaatacgaagggcaatcaggtgcgctaaacgagtcgttcgccgatgtttttggttattttattgcgccaaatcattggttgattggtgaggatgtctgtgtgcgtgggtcgcgagatgggcgaataagaagcattaaagatcctgacaaatataatcaagcggctcatatgaaagattacgaatcgcttccactcacagaggaaggcgactggggcggagttcattataatagtggtatcccgaataaagcagcctataatactatcactaaacttggaaaagaaaaaacagaacagctttattttcgcgccttaaagtactatttaacgaaaaaatcccagtttaccgatgcgaaaaaagcgcttcaacaagcagcgaaagatttatatggtgaagatgcttctaaaaaagttgctgaagcttgggaagcagttggggttaactgattaacaaatgttagagaaaaattaattctccaagtgatattcttaaaataattcatgaatattttttcttatattagctaattaagaagataactaactgctaatccaatttttaacggaacaaattagtgaaaatgaaggccgaattttccttgttctaaaaaggttgtattagcgtatcacgaggagggagtataagtgggattaaacagatttatgcgtgcgatgatggtggttttcattactgccaattgcattacgattaaccccgacataatatttgcagcgacagatagcgaagattctagtctaaacacagatgaatgggaagaagaaaaaacagaagagcaaccaagcgaggtaaatacgggaccaagatacgaaactgcacgtgaagtaagttcacgtgatattaaagaactagaaaaatcgaataaagtgagaaatacgaacaaagcagacctaatagcaatgttgaaagaaaaagcagaaaaaggtccaaatatcaataataacaacagtgaacaaactgagaatgcggctataaatgaagaggcttcaggagccgaccgaccagctatacaagtggagcgtcgtcatccaggattgccatcggatagcgcagcggaaattaaaaaaagaaggaaagccatagcatcatcggatagtgagcttgaaagccttacttatccggataaaccaacaaaagtaaataagaaaaaagtggcgaaagagtcagttgcggatgcttctgaaagtgacttagattctagcatgcagtcagcagatgagtcttcaccacaacctttaaaagcaaaccaacaaccatttttccctaaagtatttaaaaaaataaaagatgcggggaaatgggtacgtgataaaatcgacgaaaatcctgaagtaaagaaagcgattgttgataaaagtgcagggttaattgaccaattattaaccaaaaagaaaagtgaagaggtaaatgcttcggacttcccgccaccacctacggatgaagagttaagacttgctttgccagagacaccaatgcttcttggttttaatgctcctgctacatcagaaccgagctcattcgaatttccaccaccacctacggatgaagagttaagacttgctttgccagagacgccaatgcttcttggttttaatgctcctgctacatcggaaccgagctcgttcgaatttccaccgcctccaacagaagatgaactagaaatcatccgggaaacagcatcctcgctagattctagttttacaagaggggatttagctagtttgagaaatgctattaatcgccatagtcaaaatttctctgatttcccaccaatcccaacagaagaagagttgaacgggagaggcggtagaccaacatctgaagaatttagttcgctgaatagtggtgattttacagatgacgaaaacagcgagacaacagaagaagaaattgatcgcctagctgatttaagagatagaggaacaggaaaacactcaagaaatgcgggttttttaccattaaatccgtttgctagcagcccggttccttcgttaagtccaaaggtatcgaaaataagcgcaccggctctgataagtgacataactaaaaaaacgccatttaagaatccatcacagccattaaatgtgtttaataaaaaaactacaacgaaaacagtgactaaaaaaccaacccctgtaaagaccgcaccaaagctagcagaacttcctgccacaaaaccacaagaaaccgtacttagggaaaataaaacaccctttatagaaaaacaagcagaaacaaacaagcagtcaattaatatgccgagcctaccagtaatccaaaaagaagctacagagagcgataaagaggaaatgaaaccacaaaccgaggaaaaaatggtagaggaaagcgaatcagctaataacgcaaacggaaaaaatcgttctgctggcattgaagaaggaaaactaattgctaaaagtgcagaagacgaaaaagcgaaggaagaaccagggaaccatacgacgttaattcttgcaatgttagctattggcgtgttctctttaggggcgtttatcaaaattattcaattaagaaaaaataattaaaaacacagaacgaaagaaaaagtgaggtgaatgatatgaaattcaaaaaggtggttctaggtatgtgcttgatcgcaagtgttctagtctttccggtaacgataaaagcaaatgcctgttgtgatgaatacttacaaacacccgcagctccgcatgatattgacagcaaattaccacataaacttagttggtccgcggataacccgacaaatactgacgtaaatacgcactattggctttttaaacaagcggaaaaaatactagctaaagatgtaaatcatatgcgagctaatttaatgaatgaacttaaaaaattcgataaacaaatagctcaaggaatatatgatgcggatcataaaaatccatattatgatactagtacatttttatctcatttttataatcctgatagagataatacttatttgccgggttttgctaatgcgaaaataacaggagcaaagtatttcaatcaatcggtgactgattaccgagaagggaaatttgacacagcgttttataaattaggcctagcaatccattattatacggatattagtcaacctatgcacgccaataattttaccgcaatatcataccctccaggctaccactgtgcatatgaaaattacgtagataccattaaacacaattatcaagcaacggaagacatggtagcaaaaagattttgctcagatgacgtgaaagactggctctatgaaaatgcgaaaagggcgaaagcggactacccgaaaatagtcaatgcgaaaactaaaaaatcatatttagtaggaaattctgaatggaaaaaggatacagtggaacctactggagctagactaagagattcacagcaaactttggcaggttttttagaattttggtctaaaaaaacaaatgaataacaatatttaggaatacattcttatccactcgttagcgggtggatatattttatggggaggaagtaagccaaatgtatataaaagggaggttaatctttttctttgtagtgttagtaatcgcgttatgttccgtattaatattgcttataataaaaataagcgtatggaaagatgaaccatttcatttaagcgatgcaaaggagattgagtgtcttggaagttgtgaaataaaaaatactaatcaaaaaatccatttcttctccataaaagagaatttgtttgaggaaaagggtgatatagctggaattttaaatgaagacgaacaaaaagttgctgataagtccattttcattgttattttggatgatgaaaaagggattgcgaacgaagagtaaagttacgatgagttgtgactttttcgtgtcaatcaaaaaagtattgttgggaaatgttcacaaaatatctattgcaatagtgcggtttgttaggtagtcttgaatagttaaaaaacaatataggaggaacatctatgaaaatgcttaaaaagggtaccgcagttctatttgtaatgatcatggcagttatgttagtcgcgtgtggggataaagaagaaacgaaaacttacacactttcccaaaatggtgttgattctaaattaacatacacatataagggagacaaagttactaaacaaacagctgaaaatacaatgtcatatgcttcgttaggtgtggcttcaaaagaagacgctgaaaaaatgcttaaagcaacaagcgataaattccaaggtattgatggtttaaaagaaaagattgaatataaagatgataaagctattgaaacactagaagtagattacactaaaatctcttcggaagatatgaacaaaatccctggtatgtcttcaaatggtgatacttctaaagggattagcatggaggaatctgcaaaaatgctagaatcccaaggctataaagaagtttcaaaataaatttgcaataaaaaagaagtatccgattcatttggatacttcttttttatttaataatcttgcgcttcgatgacaacagctgtaccagatgcagtgaccattagcattccgttatcagctccaagcacttcataatcaatatcaacaccgataacggcatttgcgccaatatctttcgcacgttgttccatttcacgaattgcttcctcgcgagcattaataagttcatcttcatagccttgcgaacggcccccgaagaaatttcgaagtccagccccaatatctttcataaagttaacgccagtgatgacttcgccgaaaacgatttttttatattcgataatttgtttgccttcaatatttggtgaagttgttacaatcatgagttatccctccagtttttcttttatcatacctcttagtactttttctagtcaaaggatatccggttatttcgtacgatttcgcgctttttctatataagaaatagcatctggaactttacaagctgtatttccaaggtttacatgaactttcccgactgatttcgcggcttccatcgctttttcgtgcaaatcgtctttgtaaattccacaagtgataataaaaccgttcattgaatagcgggttctattggtttctgtttgcagcgtttctttcgcgcgttgaagtaatgtctctgcttcaggcaaattgttaatatgttcgctgtaaatctgccagcccatggatttagttaaatcataatcactttcaatccatgttttggcgaaaaggagtgcatcatcacgtttgcttacaatcgatgctagtccaaaagttagttgtgaccatgtttcgcgaaaagcgatattccatttttcgatttgttcggtggttattttgtttggattaattgctagcaaaccgagataaatcaagtcactattatttgattcaatcagttttacggcgagttcgtgattttttgtcagtttttctcggcggatgattttctttaaatcaccaatttttagtccgtaaagatctaatgaatccggacaaccgtgattacgaaaaattttgatcgtattggggttttctaaggcttgtagctcggtgtcaagttggtcaaaagtaatcatacgcgtcactcctctcgaataaagtaagtataacaaaaaaagcatgcgaaggcgcatgctttaggatttaagaatattagtctatttgtttcattgcgtcgtctagaacttttttaagtgtatctgcggagtttttcatttgttctttttctttgtcatttaagttcatttcaacaatatggcgaacgccttgacggttaacgactgctggtgcacctatataaatatcgttcataccgtaatggccatctaaataaacagaaagtggcaaaatcgcattttcgttatttagaattgcttttgtaatacgagcaagagctgcagcaacgccgtagaatgtagcgccttttttattaataatttcataagctgcatcacgaacacttacgaaaatagtatccattgcaccttgttcatcttcgctaatccattcagtaattggaaggccgccgacagttgtgtggctccatgctgggaattctgtatcgccgtgttcgccaaggatgtaaccatggacgttacgagcatctacttttagatagtcagcaattgacatacggaaacgtgctgtatcaaggcttgttccagaaccgataacacgttcttttggaagacctgagaatttccatgtagcgtaagttaagatgtctactgggttagaagcgattaagaagataccatcaaatccgcttgccataacttcatccacgatgcctttcatgattttgatattacgatttactagatctaaacgagtttcaccaggtttttgagcagtaccggcagttacaacaactaagtccgcatcgtggcagtcgctataatttgctgagtagattttcttcggtgtagaaaatggaacggcatggcttaaatccattgcatccccaattgttctgtctttatctatgtcaataatgccgaattcttgtccaatgcttaaatttacacaagcaaatgcgtaactagaaccaactgctccgtcgccaactaaaataattttttgatgatctttcatttcgaattcctcctataaaaaatctatttactagtacagtataccatgtatttttcatttgtgaagcgttgaacgtcctaaatttaaaaaagttgttataatgaatttgtgaaaacgctgtagtacagtttggaagcgtccacattagcgagtaaccgctattttctgtttaccttttattgagaattataaaccttacaaaacaaaataaggctattcctttgttttgctatttttctaaagggtagatataatgtagatgtaccaaaattgaatgagtggagtgattttttatggcaacaacattagaggtccagaaaagagaaacaacgcaacattcagaagtaacgagattgcgtagtgaaggaaaagtacctggaattatttatggctacaaatcggaaaatgttccagtttccgttgattctttggaattaatcaaggcagttcgtgacaatggtcgtaacgccgtattttcagttactgtggacggcaagaaattaaacgttttattacatgaatatcaagtggacccgttaaaggatgttttagtacatgttgatttactagcggttgatatgaatgaagaagttgagacagatgttcgtgtggtattagttggggatgctcctggcgttaaagctggcggtgtacttcaacaaattatccatgatgtaaaagtttcagcaacaccagaaaaattaccagaaacaattgaattagacatttcttcattagaaatcggtgatgttttaacaacgaacgaccttccggaaaacaaagattatgttgtgcaagctgaagaagaagaaacggtagtaactgtatctgctcctcgtgctgaagaagaaccaacgactacggaagcacctgaaccagaagctgtacatggtaaagatgaagaacctgttgaataaattctaataaataaggatggaagattcgcatttgtttgcgatatcttccattttttttgttataatagtttcgagaaggaggcgtttatatgcttgataagtcagtaccacatatttctgttattatggtgaatcacgatgctacaaattatccagagtttcatttacctgcgggatattctttttgcttttataaagatgggttggaagaagactggtgtagattgcaattagaaacaggacaagtgctttcaatggatagtattcgcgctcgttttgaaacggaatttggaaatgaaaaagaaaaattaaccaagcgctgcatctttgtaaaggccccaaatggagaaattattggaacggctatgctttgggacggaaatacatttggcaaaatagaaagccggattcactgggttgcagttcttgactcccacggtggaaaaggtatcgcaaaagctttattatccaaaattctcggcttgaataaaagcaaatttgtctatttaacaacgcaaacaggtagctaccaagccatctatttatatcggaaattcggttttgaaaaatacgtcggaaaaacaccggaaaattggaaaacagtcaattttcaagaggaaaaggaaacagcctggcaaattatcgaaaataaaattgccgaacaccaagcctagttggaaaactttcaaccaagtgaaatccatgttataatcaaaaaaacatcgaaacaaaaaccagttcattcgtgaagtggtttcgttcatgtaaggagaagcttttatgaaattaatagcaggactcggaaatccgggcaaaaaatacgaacgtacccggcataatgtcggttttatggtagttgacgagctgagttttcgtcatcaaaccccttggaagaaatcaaaatttaatggtatgacaagcgaaattatcgttggcggtgaaaaaatgattttagttaaaccgctcacttttatgaatgcttcaggtgagtgcattcgtccgctcatggattactacaacataccaattgaagatgttgtgattgtgtatgatgatcttgatttaccagttgggaaaattagattacgccaaaaaggtagcgctggcggacacaatgggatgaaatcaattatccaacacgttaaaacacaagagtttaatcgtattcgtgttggtgttagtcgtcccttaaaaggagaagtaattaattatgtcttaggagattttcctaaagcagaacaacctgatattatcgcagcaattcaaaaaagtgctgatgccatcgaagactttgcacagacaccatttatagaagttatgaacaaatacaatcaaaaatagacaatgacgacgcgtggcaatctttttgccacgtatttcggtctttcttcggacgcatgatttactcttgtgttacatagaatgaattttctgacaaaaaggagctgttttcccttgaaaggattacaacaattaatatatgaacaaaaagatattcgggcggtcttaaatgcgctggatgaaaaagaaaaagcacaacttgtcacagggctcacaggttcttcgcgcgcattatttgcaagcgtggtagaaggtgcgtcaaagcgtccggttgtatttgttacgcataatttataccacgcacaaaaattatatgacgatttactttctttaatggatgtcgatcgactgtttttatatccagctgatgaattaatttcttctgagttgagtatttctagcccagaacttcgtggtcagcgtgtggaagcacttgacttcttgctatccgggaaaccggggattgttatcgtcccagtagctgggttaagaaaaatgcttccgccagtatcgctttggaaacatttcaacatatccattgtagaaggtgaagaaattgatccagatgtactgcgtcaaaaattagttacaatgggatacacgatgagtggaatggtaaatactcctggagaattcagtgttcgcggcggaattattgatatttatccaattaccgaagagtttccaattagaatagaactttttgacaccgaagtggattctcttcgtttctttgatgtggaaacgcagcgctcaacaacacgcgtggaagaatttcgcctgctacctgcaactgaaatcattttagatcaaagctattacccggatatcgtcaagcgcttagaaaagaaaatgatgcttactttaaatgaactaaaagaacaggaagataagcaagcgctcattgaaaatttagaagaagaccttgaaatgcttcgttctggcgtgaaaccagacatgttctttaaatatatcggtctggcgtatccggacccagcctcgctttttgattatttaccaaaaaacacggcaattttgctggatgagtttgggcggattttggaaacagaagaaagcttggagcgagaagaagcggagtggcaaacggaaacattaagtcgaatggaaacagttcgcgacgtgcaagtaagccattctttcaaaaaattattagaaggaaatcactcgccaaaaatatacttatcacttttccaaaaacaaatggcgagcatgcgcgtttctaaaacaaccaacatcgtctataaacaaatgcaacaatttcacggtcaaatgaatgtgttaaaaaccgagctggaaagttggcataagaacaattatgcggttgttatattagctccaaacttagaacgcgcagaaaaaatgcaacaaactttgactgactacgatatggaaagcacgattttgaaaaaagaatcggatgtgccgaaatatggaatggttcaatttgtcatcggaacgttccagaatggttttgaacttccgcttgccaaagtagctattataagtgaaactgaactgttcaataaaaaaatcaaaaaggtgaagaaaaggcaaaaactctcaaatgcagaacgaattcaaagttattctgagttaaaagtaggcgactacgtagttcacgttaaccatggtatcgctcgctatgttggcatggaaacgctagatatcaacggcgtgcataaagattatttgctacttgtttaccaaggtgaagataaactatttatccctgttgaccaacttgacttagttcaaaaatatgttggtgcagaaggtaaatcaccaagattaaacaaacttggtggggctgaatggaagcgagtgaagaaaaaagtacaagcttccgtccaagatatcgcagacgatttaatcaaactatacgccgaacgtgaagctgaaaaaggctatgcgtttagtgcggatgatgaaatgcagcgcgaatttgaagaagctttcccgtatcaagaaaccgaagaccaactccgctcgatttcagaaatcaaaaaagatatggaacgaccgcgcccgatggatcgtctgttggttggagatgttggttacggaaaaaccgaagtggctttacgagctgctttcaaagcgattatggatggcaaacaagtcgccttcttagttccaaccactattttagcgcaacaacattttgaaacaatgaaagaacgtttccaaggctttccaatagagattggacttttaagccgttttcgcacgaaaaaacaacaaacagaaacattaaaaggcatgaaaaacggcacagttgatgttgttgttggtacccatcgtttgctatcaaaagatgtggaatatcaagatttaggtttattgattgtcgatgaagagcaacgattcggcgtaactcacaaagaaaaaatcaaacaaatgcgttccaaaatagacgtattaacactgacggcgacgccaatcccaagaactctacacatgtccatgctcggcgttcgtgacctctccgtcatcgaaactccgccagcgaaccgttttccagtgcaaacatatgtggcggagcagaataacgttttagtacgagaagcaattgaacgtgaactagcgcgcgacggacaagtttattatctatataatcgagtggaatccattacgcaaaaagcagatgaaatttctgcgatggttcctgatgctagggttgccactgcgcacgggcaaatgggcgaatcggaattagaatccgttattttaagtttccttgaaggggaattcgatgtgcttgtaacgacgaccatcattgaaaccggcgtagacattccaaacgttaatacactctttgttcaagatgccgatcggatggggctttcacaactttatcagttgcgcggacgagtaggacgttggaacagaatcgcctacgcttatttcatgtatcaaaaagataaaatattgcgtgaggaagcggagaaacgcttatcggctattaaggaattcactgaattaggttcaggtttcaaaatagcgatgcgtgacttatctattcgtggtgccggtaatatcctcggagcgcaacaacatggctttatcgattcagtcgggtttgatctctactcgcaaatgcttaaggaagcaattgaggcgaaaaagccaaaagaagaacaaaaacaaattgtccctgttgaaattgatatccaagcagacgcctatattccggaatattatatcactgacggacgccaaaaaatcgagatgtacaaacgtttccgcaatattgaaacgttaagcgaactcgaagatttacaaagcgatatgattgaccgttttggtgaatatccggaagaagtagaatatctattcacaatgacagaactcaaagtccgtgcgctcgaagttggtattgagtctgttaaacaagaacaaaataaaattaccatgctattttcggaaagtggaaccgcgggcattcgcggagatatcgtcatgcaaatcattggtgaatttggtcgaatggtcggcgtgggtatggaaggcacacaactaaaaatcacgataaacgtccaaaataaacctttaaaagaatggttataccaagtcaaaagtttggctgaaaaacttcgcggagctatgaaagaaaaagcatctacagaaaattgataagttattaagaaggaaggaggtggcggagtgtcagaacgttccatgaagcgactaatgaaaggagcggcttggctaaccgcggcctctcttatttctaaaatacttagtgcaatttaccgagtaccctttcaaaatatggtgggggatgtagggttttatattttccaacaagtatatccgatatacggaattgcaatgacactcgcactcggagggttcccagttgttatttctaaaatgttagcggaggcagaaggtgatgtaagacgacaacaaataattatgcgcgcagtctcacggatgctccgaatcgtaagtattgtgattttcgcctttttattcctatttgccaacctgattgccatcatgatgggcgacccagctttatctgaattaattcgggtcatcagtttcgtatttttacttatgccgcagcttgcttttatgcgtggctttttccaaggagaaggagacatgattccgaccgcaatctcgcaaacagtcgaacaaattattcgagtagcgattattttgataggtgcgggacttgcacttcattttaactttgatttatatgatgcaggttcaatggcgatgagtggtgcctttttcggtggggtttcaggaattttcattttgcgtcatttttataataaaaaggtaaggctcggggaagggattcaaccagctgtatttacaaataaagaagaaaaagtaggtattggccgcaccttcttgcggcaaagtgttgcaatttgtgtagttagctccatgcttattttattccaattagttgattccttccaagtatatcgtttaatgagtgactcagggattccggatttcatcgctaagtcgctaaaaggggtatacgaccgcggacagccaatcttgcaattaggtttagtcatctcaactggacttgcgctcgcgcttgtcccaatgattactgccgcgagagttcaaggtcaacaaaaagaactaaaacgctccgtgctattggcgattaagattacgttaattttgtcaggtgcagaaacaattggactcatagttattatgcgcccgctaaaccaaatgcttttccaaacgccagacggcacattcgttttacaattatttatgccagctgttttcctgagctcactaatcatcatgttaagcagtattttacaaggcttcggaaaaattgctgtacccgcagttggcgttggaattggacttattgtaaaatgggtaacagggggcattcttattccgagacttgcgacagtgggtgcatccgtttcgacgtgtgttggcttacttgtaatcctcctcatttgttacgtatcactaaaacaaacaatccgcgtgcctttcgttgaaaaaacaatgttgttcaggctagttgccgctttagtactaatggctgtattcccgtgcttattcgaatggttagcgccactcgacacaagactcggtagtgcattccaagcaattgttagtgcactagtgggtggcgggattttccttgtttttgcactaagatataaattactcggtccaaaagattttgttttccttccgtttggttccaaattattagcactaagtaagcttgttgcacggaaataattaatataaagtaggtgaataaaatggctacaaccatgcgattagataaatatttaaaagtatctcgactaattaaaagacgtacagtagcaaaagaagtagcagaaaaaggacgcattgcggtaaacggagtaacagcgaaaccaggaaccaatgtaaaatctggagatgaactagttattcgctttggccctaaaatcgttacagcgaaaatcgaacgtctagaagaaaatgcgaaaaaagaacaagcaactgaaatgtatacgattattaaagaagaacgcacagacgaaagtagataaagaaaaatcgtttgaaatggcactgattagccgatttcaaacgattttttattgaacaagaaaacttgcaaacaattttttgtcaaaaagtcaagaaaaatatcataaaattagcggattccaatagacaaatgcctgatttattgatatcattttaagcaagaaacgtttttttctctaccgaaaatcatagacaataagcaaataagaacatgggagggacgatgtatgaaaaaagccaaatcaaaagtggcgagaatagaaaatcgctacataaaagatactgcaacaatgaaaaaaactcgtagtcgtcgccgcattgccctgttccgtagacttgcttttatggctattatctttgctgtggtgggtggactattaaccatcacgtacactaaacaagtgttgacgctcaaagagaaaaaagaaaagcaagtgcaagtggataagaaaatggttgcaatgaaggacgaacaagactcgctaaatgagcaaatcaagaaacttcacaatgatgattacatagctaaattagcaaggagtgaatattacctgtccaaagacggagaaattatttttaatattccagaagagaattcgaaacaaaaagagtaagtcagagccgagccgtcattctccatggtaaaatcaaagggaaatagagttgagtattttgggagtttgtaagtttgactgtttgacactctttttattatagctataattaagcaatagagtgatattttaaggaggacgcatttttttatgtcgatcgaagtaggcaacaagttacaagggaaagttactgggattactaattttggagcatttgtggagctagaaggtggcaaaacaggtttagtccatattagtgaggtagcagataactatgttaaagacattaatgacatcttaactgtaggggatgaagttactgttaaagtaatgaatattggtgatgatggtaagattggtctgtccattcgtaaagcagtagatcgtccggaccgtccagagaaaagttacgatcgtaaaccaaaatacaacaaaaaacctgctgggaactatgtgaaaccagccgagagctttgaagatataatgtctaaattcttgaaagatagtgatgaaagactcactactatcaaacgccaaacagaatctaaacgtggcggccgaggagcaaaacgcggctaatacgctaaaattaattgtaaagtagatgcaccgtattggatcattaatacggtgcactttttaataaaaaatgtgagagccgtattttgaaggaaggttttcttgaatggatgacaccgaaaaacgagtacataagtatatcgagaaacatgacctaatccgatccgatgacaaattgcttgtggcagtttctggcggtccggattctttggcgttattgcattttttatggaattcaaatttagtccccaaagaagcaatttccgtcgcgcatttaaatcaccaattaagagagaatgcagcaaaagaacaacgcgtcgtcgaaactttttgcgagaggcagggcattcctttttacatagaagaagtagacataaaaagtcgagcccaaagcttgcagaaaggccttgaagaaacagctcgcattgtcaggtatgatttctttgagaaagtaatggctgagaaaaacataaacaaactagtgctcgcacaccatgcagatgaccaaatcgaaacaatcttaatgcgactagttcgtggaagtgctagcatcggatggtcaggtatacagccgaagcgcgagttaaaaggagggcaagcaatccgtccttttttaccaattacaaaagcagaaattattgattacgcccagaaacatgaattagcatacgaaattgatgaatcaaatactagtcaagaatacacaagaaatcgttacagagcacaacttttaccatttttaaagcaagaaaatccagcagtctattcgcacttcgaaagattttcagaagaaacaagcgaagacttccaatttttggaggcacttgcgagtgatttattgaagaaaaacctcatcaaaaacggcaaacagacaacacttttacttagtagctttaaaaatgaagcgaatcctttacaacgccgcgcaattcatttactattgagatatctgtacaatgaagatgccagttttattacggtaaatcacatatatcagattatccaaatgattcaaagcgacaatccatctagttcgattgatttaccaaataaactcattgcaaacagagcatacgataaactccattttcaatttggagaaagagaagctccttccgagttttatcatcaattagaactgaatgaccgcattgaattagataataaagcaagtatccgtttaaagttaaagagttccgttgttcaaacaaatgggctaaatggaatgctactggatgctgaagagataacacttcctttaattgttcgaaaccgtgtgaacggcgacaggatgacgatgaaaggacaagcaggtagtaagaaactcaaagatattttcatcgatgccaagataccaaggcaagaacgcgacaaactccctgtgataacggactatactggaaaaatcctttgggttcccggtgtgaagaagtctgcatatgaccgagaatttagtcgtagcaaaaagcaatacattattaggtacactcgaaatataggaggaaacgagagcatgcataatgatattcagaaagtgctgatatcggaggacgaattacaagagaaaattcgtgaactaggtcgtgagttaacaacagaatatgaaggacgtaacccattagtagttggggtattaaaaggtgcaactccttttatgactgatttacttaaaagagtagacacatacttagaaatggacttcatggacgtatccagttatggaaatggtactgtatcatcgggtgaagtaaaaatcattaaagaccttaatgcgtcagtagaaggtcgcgatgtacttgtaattgaagatatcattgatagcggacgtacacttagttatctagtagacctaatcaaataccgcaaagcaaaatcagttaagttggttactttacttgataaaccagctgggcgaaatgtagaaattgaagcggattatgtaggctttgtcgtaccaaatgaattcgtcgttggatatggtttggattatgcagaacgttaccgcaatctaccgtatattggtattttaaaaccagaaatttacagcgagtgaaattaattaacaaacagaactatattttgttaaaatgtaatagatagtttttcagaaaacgaaaacaaaaaattgatgtcaaacatgcaaaatagtgggcaatcgagattcggtatgctatcattaatcttagttttcgaaggtgaaaatagtatcaataaatattaaaaaatctatattaataatagaataacttcgtaagagaaaagcgaaacggatgtgtttttaataatcaggggaagaaaacattgtttctaaatctgctattagccaaaaacaacttttaaaggggtaaaagtccagaaaaagtaagaatccaagctcttgcgtgggaggaggtaaggaatgaacaggttttttagaaatgcgatattttatgtcataatattccttgttattatcgggattgttgcttcatttaactcaaacaaagaggcagccaaagatattagctattcagaatttgtgagtaagttagaagatggtaaagttaaatccgtagaaatacagccagaccgtagtgtttatacaatcaatggggaatttaaatctagtgataaaagttccgacgacaaaaaaactggtcttggacaaagcaaaacaagtagcactgctttcacaacatacgctttaaatagtgatacttctctaggcgatttacaaaaaacgttagataaagaagacgtgaaaatgaatgtagtgcctgccaaacaaaacagcggttgggttacattcctaacttctattgtaccttttgtaattatcttcatcctcttcttcttcctaatgagccagtctcaaggtggcggcggtggtaaagtaatgagctttggtaaaagtaaagccaaactttacaacgacgacaagaagaaagttcgcttcacagatgtagctggagcagacgaggaaaaacaagaacttgttgaagtagtagaattcctaaaagatccgcgcaaatttgcggaacttggcgcacgtattccaaaaggtgttcttttagtaggtcctccgggtactggtaaaaccttgctagctcgtgcagttgctggtgaagcaggcgtgccattcttctctatctcaggttcagactttgtagaaatgtttgtcggtgtcggtgcaagccgtgtccgtgacttattcgaaaatgcgaagaaaaatgcaccatgtatcattttcattgatgaaattgatgcagttggtcgtcaacgtggagctggaatgggcggcggtcacgatgaacgtgaacaaaccctaaaccaattactagttgaaatggatggtttcggcggcaatgaaggtatcatcattattgcagcaactaaccgtgcagacgtacttgacccagcgcttcttcgtccgggccgttttgaccgccaaatcatggttgatcgtccagacgtgaaaggccgtgaagcagtacttcgtgttcatgctcgtaacaaaccacttgctaaaagtgttgatctaaaagcaatcgctcaacgtacgccaggattctctggtgccgatttagaaaacttactgaatgaagccgcactcgttgcagctcgttccgataagaaagaaatagatatgagtgatctcgatgaagctagcgaccgcgtaattgccggcccagctaagaaaaatcgtgttatctctgaaaaagaacgccgcacagtcgcttatcatgaaggtggtcacgtaattgtcggaatggtacttgatgaagcggaagtcgtgcataaagttaccattgttcctcgtgggcaagctggtggttatgctgtaatgttaccaaaagaagatcgcttcttaatgacgaaagctgagttaatggaccgtattactggtttactcggtggacgcgtagccgaagaagttactttcggtgaagtaacaacaggtgcaagtaatgactttgaacgtgcaaccgaacttgctcgccgcatggtaactgaatggggtatgagtgataagattggaccacttcaatttacttctggtaacggtcaagtatttatgggccgcgatttcggtagcgacaaaggatattccgataaaatcgcctacgaaattgatacagaagttcaaagcttaatccgctactgttatgaccgcgctaaaacaatcattaccgaacatcaagaacaacataaacttatcgcggaaacattactaaaagtagaaactttagatgctcgccaaattcgttccctatttgatgacggtgtaatgcctccagatatcgatacgattgacgtagaagcagaatatccttccgaaaaagacgaagaagtagcaggtaaatcttttgaagaagaaagagaagagttaaaagaagaagaaaaagtcgaagaaactcaagaagaaccaaaagaagtcacttcggaagatgctccaaacattgagcaaacgccaaacgataaaaaagacgaataaaatcaaagaggctgggctttcccagtctcttttttgaagctatattattcggatttttaagtaaaacatgttatgatacgttagaaaaatcttctaaaggacggtatttatacttatgatacttgtaattgacgttggcaatactaattgtactgtcggagtttatgaaaaacaaaagcttctaaaacattggcgcatgacaacagatcgtcaccgcacatctgatgaattaggaatgacagtcttgaactttttttcgtatgcaaatttaacgccttctgatattcaaggaattattatttcgtccgtcgttccaccaattatgcacgcgatggaaacaatgtgtgtacgttattttaatatccgaccattaatcgttggtccaggaataaaaactggtttaaatctcaaagtagataatccgcgcgaaattggatctgaccgaatcgtaaacgccgtagcagcatcagaagaatacggtaccccggttatcgtagtcgattttggcactgcaaccacattttgctatatcgatgaatcaggtgtataccaaggtggcgcgattgctccaggcattatgatttcgaccgaagccctctataaccgtgccgcaaaacttcctcgtgtagatattgctgaatctagccaaatcatcggtaaatccaccgtgtcatctatgcaagcgggtattttttacggttttgtaggccaatgcgaagggattatcgcagaaatgaaaaagcaatccaacgcaagcccagtagtagttgcaacaggcgggctcgctcggatgataacagaaaaatcttccgcagtagacattttagatccatttttaacattaaaaggtctagaacttctatatagaagaaacaaaccgactacagaaaaataaaaggagttttatataatgagtgattatttagttaaagcgttagcctacgatggcatggcgcgtgtatatgcagcagtaacaaccgaaacaatcaaagaagcgcaaagaagacatgatacatggtcagtttcctctgccgcacttggcagaacgatgacagggacgcttttccttggagcaatgcaaaaagaagatcaaaaaatcactgttaaaatcgaaggggatggtccaattggtccaatcgttgctgatagtaatgcacaaggccaaatcagaggatacgtaacaaatccacacgttcatttcagcgaactaaatgaagctggaaaactagatgtccgccgcggggttgggacatccggtatgctttcggttgtaaaagatttaggctttggcgaaaatttcaccggacaaacaccaattgtttcaggtgaaattggcgaagattttacgtattacttagcaacatccgaacaaataaactcttccgtcggtgtaggagtgcttgttaatccagatgatacgattgaagcggcaggtggtttcatgttgcaactacttcctggcgcgacagacgaaatcattgatgaaatcgaaaaaaatctgatggctctaccaacagtttctagaatgattgaagcgggcgaaactcctgaatctatcctagctaaactagcgggcggagaagataaattacaaattttagaaaaaatcccagtttcttttgaatgtaactgttccaaagaacgctttggcagtgcaatcatttcacttggaaaagaagaaattcgttccatgatagaagaggatcatggcgcagaagcggaatgccatttttgccgaaacacttatgatttctcagaagaagaattaaaaacgttgtatgaagaagcaaaataaagaaaaaggagcgcctaattggttgctcctttttaaaagaggttaaacttgacaaaacaggtcggaattaattaaactagatgaaagacctaaaatagataggagtgctttaataatgacaattgcaaattcaatcactgatttaattggaaagacacctattgtgaaacttaatcgtttgccagaagcaggaagcgcggatgtatacgtaaaattagaatttcaaaatccgggtggtagcgtaaaagaccgtattgctaatgcaatgatcgaaagcgctgaaaaatctggtgcattaaaaccgggtgacacaattattgagccaactagcggaaatacaggtatcggcctagcaatggtagcagcagccaaaggttaccaagcaattttcgtaatgccagaaacaatgagcttagaacgtcgtaaattacttcaagcttacggtgcgaaattagttttaacaccgggaccagatggcatgaaaggtgcaattgctaaagcggaggaacttgcaaaagaaaacaactattttgttccacaacaattccacaacccagcaaacccagctgttcatgaagaaacaactggaccagaaatcgttgaagctttcggtaaagatggcttagatgctttcatcgcgggagtgggaacaggcggaacagtaactggtgtaggacacgtacttaaaaagaactacccagacgttaaaatctatgcccttgaaccagaagaatccccagtacttagtggcggttctccatctccacataaaattcaaggtatcggtgctggcttcgttccagatacgttagatacaaaagtatatgacggcattctaaaagtttcaagcgaagatgccctagaaacagcgcgtgaagtagcgaaaaaagaaggtattttagtgggtatttcttccggagcaactattaaagcagctctagaccttgcgaaagaacttggtgctggcaaaaaagtactcgcaatcgttgcaagtaatggcgaacgctacttaagcacgccgctttataattttgaagattaataatcagagagcctggattttctaggttcttttttatgaaaaaaaataaatgcatttcttactattttctaatcaaatgcacagcagaaactttcttttcttggttaatatatagtcataagctaacaacaagcaaaacattttcattctttccccttttagaatgaagatcccaaactccctttttgaccagtgtggtttactccctttttccacactggttttttaatgcgaaaaatgaaaagaaaaaccgagaaatctcatgaaactttaacaaaagtcacagcgtatccaccaaaaacttggttaatatatagtcataagctaacaacaagcaaaacattttcattctttcccctttttagaatgaagatcccaaactccctttttgaccagtgtggtttactccctttttccacactggttttttgatgcgaaaaatgaaaagaaaaaccgagaaatctcatgaaactttaacaaaagtcacagcgtatccaccaaaaacttggttaatatatagttataagctaacaacaagcaaaacattttcattctttcccctttttagaatgaaaatcccaaactccctttttgaccagtgcggtttactccctttttccacactggttttttgatgcaaaaaatgaaaagaaaaaccgagaaatctcatgaaactttaacaaatatcacagcgtatccaccgaaaacttggttaatatatagtcataagctaacaacaaacaaaacattttcattcttctccccccttttagaatgaaaatcccaaactcccttttttgaccgatgcggtttactcccttttccgcatcggtttttttgtgcgctaaaatcactaaattctgctataataaatctcggaaagaggtgtttgggcttgaagaagtggaaaagggatcacctaggtatggtcatggggatattgaatgttacgccagattctttttcagatggcgggaaatatatgcaagtagaagaagcggtggctcgagcgttacaaatggcggaagatggagcagcgattattgacgttggaggaatatctactcgtcctggtttttcggaagtaacccccgatgaagaacttgcccgaattataccggtcattaaagctgtcaggacgaaattacccgatatatggatttccgttgattcttggcgtgctgaagtagcggaacaggctatcttagcgggagctgatatgataaatgaccagtggggtgcgaaaaaagaaccgaaaattgccgaagttgctgcaaaatacgatgtaccgatttgtttaatgcacaatcgtgagaacgcgcaatacgacaattttttagaagatgtgaaaaaagacttgttagaaagtattgccatagctaaagcagcatcagtaccagacgagcatattattctcgatccaggttttggttttgttaagacacctgctcagaatttagaagtgttacgacggattgatgagatagtcgcacttggttacgaggttttactcggtacgagcaggaagtcaactattgggcttgtcctaggaactactcctggagatagaatggaaggaactggagcaacaactgtctatggattttcgaaaggttgtacaattactcgtgtccatgatgtacttccaattgcacgtatggtgcgaatgacagatgcaatcactggcaaattagatattacaaatttataaagaggtgctttagttggataaaatttatttaaacgaattagtgttttacggataccacggagttttgaaagaggaaacaaaactggggcaaacatttcgcgtgtcactaattcttggactttctaccaaaaaagcgggaatatcagatagcgtagaagatacagtcagctatgcagacgtatatgaaacagtaaaagaaatagtagaaggaaagccattcaaattaatcgaggcgcttgccgaaaaaattgcatcggaagttttaactggttatcctctattagaagaagtgactgtaaaacttattaaaccaaatcctccgattccgggacattatgattctgttgcagtagaaattgaacgtaaaagaagtgatctgaatggctaaggcgtttctatcaattggcacaaatattggcgagcgtttagagaatttaaatgacgcactaagaggtttagcggcttcgaatcaaattaatatcaccaacgtatctagcgtatacgaaacagatgcagtaggttacgaagatcaagcagcatttttaaatatcgctgtagaaattgaaacggactttccgccaattgatttattagatttttgccttgcgctcgaacttgaattggggcgagttcgattatttaagtggggtccgcgactcattgatattgatgttttattatatgatgatgttaaaaccgatacagaaaagctaaaaatcccacatccttatatgaaagaacgtgcttttgtgatgattccattaatagaaatttcaccagaaaaaagcaatcttgtagagaatccggcccttttggaagaacaaggtgttcggaaaataaaaaatcaagtcaactggtaaaattggcacttgcagaaaaaactgattatgataacatatcactagcgcaatttaagagaaaggggttttaccattaatgtttaaaataggtaacgtagaaattaagaaccaagtagttgtggcgccgatggcaggtatatccaattccgcatttcgtctaacagtcaaagaattcggagcaggcctcgtttgctgtgaaatgattagcgacaaaggaatagcataccgcaatgctaaaacacttgatatgctatatattgatgaaaaagaaaaaccactgagtctgcaaattttcggcggcgagaaagaaacgcttgtagaagctgcgaaattcgtagctgaaaacacaacggcagatattattgatattaatatgggctgcccggtaaacaaaattatcaaatgtgaagctggagcaaaatggctacttgatccaaataaagtgtatgacatggtagctgctgtagtggacgctgttgataaaccagttacggtaaaaatgcgtattggctgggacgaagaacatgtctttgctatcgaaaatgcacttgctgctgaacgtgccggagctgcagctgttgcaatgcacggccgtactcgtgtgcaaatgtacgaaggtagtgcgaactgggatgtactaagagacgtaaaacgcgaactgaaaatcccgttcatggcaaatggggacgtgagaaccccagaagatgccaaacgaattttagaacatactggagcagatggagtaatgattggtcgagctgcacttggaaatccgtggatgatttatcgcacggtgaaattcctagaaacaggcgaacttctcctagaaccagaaccacgcgaaaaaatgcaaactgccatgctacacctaaaccgcttagtcgagttaaaaggagaaaacattgcagttcgtgaatttagacaacacgcagcttattatctaaaaggagctcgcggaagcactcgcgcgaaagtggctgctaaccaagcgacaaaacaatcagagatggaagcaattttaaatgaatttgttcttcaatatgaagaaaaagcattagcgaaacaagactaattaggattgcctcgagatttcggggcaatttttaaatttatactagaaaaaccagaccgaaaaagcgtataatggaaacatctgtagaaatgaatagaataggagtgtacctatatgagtaacgagaatcatgaagaactaaatgaccaactcatcgtccgtcgtgaaaaagtggacacattgcgcgaagaaggcatagatccttttggcgaaaaattcatccgttccatcagcccggaagaaatcgaaacaaaattcgctgataaatcaaaagaagaacttgaagaagctgctattgaagtttctgtagcaggtcgtattatgacaaagcgtgtaaagggtaaggtaggtttcacacatattcaagaccgtttccatcaattacaaatctatatccgtaaagatgcgattggcgaagatgcttacgcagtcttcaaattagcagatctaggtgacattattggtataaaaggaactattttccgtactaatacaggtgaactttctgttaaagcaacggaattcactttgctttccaaatcgttacgtccacttcctgataaatatcatggtttaaaagacgtagaacaacgctatcgtcaacgctatttagacttaatcacaaacgaagaaagtcaaaatcgctttgtgatgcgcagtaaaatcttgaaatacactcgtgattatatggataaccaaggattcttagaagtagaaactccggtgcttcatacaattgctggtggtgctgctgcaaaaccatttatcacgcaccataatgcgcttgatatggaattatacttgcgaatcgctttagaactacacttaaaacgtctaatcgttggtgggatggataaagtgtacgaaattggccgtgttttccgtaatgaaggaacatccacgcgtcataacccagaatttacaatgctagaatcctatgcagcatacgaagattatgaagatgttatggatctggtagaaggtttagtatccacggtatgtaaacaagtaaatggaacaacagaaataacatacggtgaatacaaagtagatttaactcctaactggcgccgtatccacatggcagatgctgtaaaagaatacgtaggagtggatttttggaacgtaacttccgatgaagaagcgcgtgaactagcaaaaaaacatgatgtgccagtaacggaacacatgacatacgggcacattcttaatgagtttttcgaaacatacgtagaagaaaagctcattcaaccaacctttgtttacgggcatccggtggaaatttccccattagcgaagaaaaacaaagaagatgaacgttttactgaccgttttgaattatttatcgttggtcgtgaacatgcaaatgcattctcagaattaaacgatccaattgatcaaagagaacgctttgaagcgcaaatgaaagaacgtgagcaaggtaatgatgaagcacacggaatggatgcagatttccttgaagctttagaatacggtctaccgccaactggtggacttggaataggtattgatcgtctagtaatgctattaacagatgccccgtctattcgtgatatcctattattcccaactatgaaacaccgcgactaattaaaaatccagagctgattatatcggttctggattttgttgttttcccagaaaaaaacaaatttgccaaagagaaactttttctcaaaaatatgcttgcaatccctataaaaacatgatatatttataaacgttccagttaaacaaacacaaaatgctcatcaagaaattaaatttttttgaaaaaacatcttgactttgttaactagatagagtaagatataagagttgctgctaaaggcaacaaagaagaaaaagtgacctttgaaaactgaacaaagaagaagacgaaaagcaatgagacgtaaagtctcactggtaatcgcagggcagaaaacagaaagctgttttcaacaaaacaaactagtaatttaattgctagcgaagtcaatttgacgcaaggaatcttattcacggtgttgaataagtattcaaattcaatttatattttaaagagagtttgatcctggctcaggacgaacgctggcggcgtgcctaatacatgcaagtcgaacgaacggaggaagagcttgctcttccaatgttagtggcggacgggtgagtaacacgtgggcaacctgcctgtaagttggggataactccgggaaaccggggctaataccgaatgataagatgtggcgcatgccacgcctttgaaagatggtttcggctatcgcttacagatgggcccgcggtgcattagctagttggtagggtaatggcctaccaaggcaacgatgcatagccgacctgagagggtgatcggccacactgggactgagacacggcccagactcctacgggaggcagcagtagggaatcttccgcaatggacgaaagtctgacggagcaacgccgcgtgtatgaagaaggttttcggatcgtaaagtactgttgttagagaagaacaaggataagagtaactgcttgtcccttgacggtatctaaccagaaagccacggctaactacgtgccagcagccgcggtaatacgtaggtggcaagcgttgtccggatttattgggcgtaaagcgcgcgcaggcggtcttttaagtctgatgtgaaagcccccggcttaaccggggagggtcattggaaactggaagactggagtgcagaagaggagagtggaattccacgtgtagcggtgaaatgcgtagatatgtggaggaacaccagtggcgaaggcgactctctggtctgtaactgacgctgaggcgcgaaagcgtggggagcaaacaggattagataccctggtagtccacgccgtaaacgatgagtgctaagtgttagggggtttccgccccttagtgctgcagctaacgcattaagcactccgcctggggagtacgaccgcaaggttgaaactcaaaggaattgacgggggcccgcacaagcggtggagcatgtggtttaattcgaagcaacgcgaagaaccttaccaggtcttgacatcctttgaccactctggagacagagctttcccttcggggacaaagtgacaggtggtgcatggttgtcgtcagctcgtgtcgtgagatgttgggttaagtcccgcaacgagcgcaacccttgattttagttgccagcatttagttgggcactctaaagtgactgccggtgcaagccggaggaaggtggggatgacgtcaaatcatcatgccccttatgacctgggctacacacgtgctacaatggatagtacaaagggtcgcgaagccgcgaggtggagctaatcccataaaactattctcagttcggattgtaggctgcaactcgcctacatgaagccggaatcgctagtaatcgtggatcagcatgccacggtgaatacgttcccgggccttgtacacaccgcccgtcacaccacgagagtttgtaacacccgaagtcggtagggtaacctttatggagccagccgccgaaggtgggacagataattggggtgaagtcgtaacaaggtagccgtatcggaaggtgcggctggatcacctcctttctaaggaaaaggaaacctgtgagttttcgttcttctctatttgttcagttttgagaggttagtacttctcagtatgtttgttctttgaaaactagataagaaagttagtaaagttagcatagataatttattatttatgacacaagtaaccgagaatcatctgaaagtgaatctttcatctgattggatgtatcatcgctgatacggaaaatcagaaaaacaacctttacttcgtagaagtaaattggttaagttagaaagggcgcacggtggatgccttggcactaggagccgaagaaggacgggactaacaccgatatgctttggggagctgtacgtaagcgttgatccagagatttccgaatgggggaacccactatctttagtcggatagtatccttacgtgaatacatagcgtgaggaaggcagacccagggaactgaaacatctaagtacctggaggaagagaaagaaaaatcgatttcctgagtagcggcgagcgaaacggaaagagcccaaaccaagaagcttgcttcttggggttgtaggacactctatacggagttacaaaagaaagttataaatgaagcggtctggaaaggcccgccaaagacggtaacagcccggtagttgaaatagctttccctccagagtggatcctgagtacggcggaacacgtgaaattccgtcggaatccgggaggaccatctcccaaggctaaatactccctagtgaccgatagtgaaccagtaccgtgagggaaaggtgaaaagcaccccggaaggggagtgaaacagttcctgaaaccgtgtgcctacaagtagttagagcccgttaatgggtgatagcgtgccttttgtagaatgaaccggcgagttacgatttgttgcaaggttaagcggaaaaagcggagccgtagcgaaagcgagtctgaatagggcgcataagtaacaggtcgtagacccgaaaccaggtgatctacccatgtccaggatgaaggtaaggtaatacttactggaggtccgaacccacgcacgttgaaaagtgcggggatgaggtgtgggtagcggagaaattccaatcgaacttggagatagctggttctctccgaaatagctttagggctagcctcgaggtaaagagtcatggaggtagagcactgtttggactaggggcccttctcgggttaccgaattcagataaactccgaatgccatgtacttatactcgggagtcagactgcgagtgataagatccgtagtcgaaagggaaacagcccagaccaccagttaaggtccccaaatatatgttaagtggaaaaggatgtggggttgcttagacaaccaggatgttggcttagaagcagccaccattgaaagagtgcgtaatagctcactggtcgagtgaccccgcgccgaaaatgtaccggggctaaacatattaccgaaactgtggatgaacctctttagaggttcgtggtaggagagcgttctaagggcggtgaagtcagaccggaaggactggtggagcgcttagaagtgagaatgccggtatgagtagcgaaagaagggtgagaatcccttccaccgaatatctaaggtttcctgaggaaggctcgtccgctcagggttagtcgggacctaagccgaggccgataggcgtaggcgatggacaacaggtagagattcctgtaccagtgctaattgtttaaccgatggggtgacacagaaggatagggaatcgcacgaatggaaatgtgcgtccaagcagtgagtgtgagaagtaggcaaatccgcttctcgcgaagcatgagctgtgatggggaaggaaattaagtacggaagttcctgatttcacgctgtcaagaaaagcctctaggaagagtagtactgcccgtaccgcaaaccgacacaggtagatgaggagagaatcctaaggtgagcgagagaactctcgttaaggaactcggcaaaatgaccccgtaacttcgggagaaggggtgctctattagggtgcaagcccgagagagccgcagtgaataggcccaggcgactgtttagcaaaaacacaggtctctgcaaaaccgtaaggtgacgtataggggctgacgcctgcccggtgctggaaggttaagaggagtgcttagcttcggcgaaggtacgaattgaagccccagtaaacggcggccgtaactataacggtcctaaggtagcgaaattccttgtcgggtaagttccgacccgcacgaaaggcgcaacgatctgggcactgtctcaacgagagactcggtgaaattatagtacctgtgaagatgcaggttacccgcgacaggacggaaagaccccgtggagctttactgcaacctgatatggaatgtttgtaccgcttgtacaggataggtaggagccgaagagacgtgtgcgctagcatacgaggaggcaatggtgggatactaccctggctgtatgaccattctaacccgccacgcttagcgcgtggggagacagtgtcaggtgggcagtttgactggggcggtcgcctcctaaagagtaacggaggcgcccaaaggttccctcagaatggatggaaatcattcgcagagtgtaaaggcacaagggagcttgactgcgagactgacaagtcgagcagggacgaaagtcgggcttagtgatccggtggttccgcatggaagggccatcgctcaacggataaaagctaccccggggataacaggcttatctcccccaagagtccacatcgacggggaggtttggcacctcgatgtcggctcgtcgcatcctggggctgtagtcggtcccaagggttgggctgttcgcccattaaagcggcacgcgagctgggttcagaacgtcgtgagacagttcggtccctatccgtcgcgggcgcaggaaatttgagaggagctgtccttagtacgagaggaccgggatggacacaccgctggtgtaccagttgttccgccaggagcatcgctgggtagctatgtgtggcagggataaacgctgaaagcatctaagcgtgaagcccccctcaagatgagatttcccatttcttcggaaagtaagatccctgaaagatgatcaggtagataggtttggagtggaagtgtagcgatacatggagcggacaaatactaatcgatcgaggacttaaccaaaaaatgaaacgaagttacctaactgaacactttcttctctagttttgagagagcaatctttcaacaactcaatattgtctggtagttatggcgagaaggtcacacccgttcccatcccgaacacggtagttaagcttctctgcgccaatggtagttgggggcttccccctgcgagagtaggtcgctgccgggcagtatttctggaggtttagctcagctgggagagcatctgccttacaagcagagggtcagcggttcgatcccgttaacctccattttttatgccggcttagctcagttggtagagcaactgatttgtaatcagtaggtcgcgagttcgactcttgcagccggcaccattaatattaactttataataatacatattttttattgtagagagccgttagctcagttggtagagcatctgacttttaatcagagggtcgctggttcgaacccagcacggctcacttttgcgggtgtggcggaattggcagacgcaccagatttaggatctggcgccgcgaggcgtgggggttcaagtcccttcacccgcacttattttaaatatgcggaagtagttcagtggtagaacatcaccttgccaaggtgggggtcgcgggttcgaaccccgtcttccgcttgtttacaaaagttccaatatgccggggtggcggaactggcagacgcacaggacttaaaatcctgcggatagtgatatccgtaccggttcgattccggtcctcggcattatttttatatgcgcccatagctcaactggatagagtacttgactacgaatcaagcggttagaggttcgactcctcttgggcgcactttattaaacgggaagtagctcagcttggtagagcacttggtttgggaccaaggggtcgcaggttcgaatcctgtcttcccgattgttttgaattttattatggggccttagctcagctgggagagcgcctgctttgcacgcaggaggtcagcggttcgatcccgctaggctccaccaaattatttctaaaaatgtgttgacattgtttagagaatagagtaagatataaaagttgctgctaaaggcaacgaagaagaaaaagtgacctttgaaaactgaacaaagaagaagacgaaaagcaatgagacgtaaagtctcactggtaatcgcagggcagaaaacagaaagctgttttcaacaaaacaaactagtaatttaattgctagcgaagtcaatttgacgcaaggaatcttattcacggtgttgaataagtattcaaattcaatttatattttaaagagagtttgatcctggctcaggacgaacgctggcggcgtgcctaatacatgcaagtcgaacgaacggaggaagagcttgctcttccaatgttagtggcggacgggtgagtaacacgtgggcaacctgcctgtaagttggggataactccgggaaaccggggctaataccgaatgataaagtgtggcgcatgccacgcttttgaaagatggtttcggctatcgcttacagatgggcccgcggtgcattagctagttggtagggtaatggcctaccaaggcaacgatgcatagccgacctgagagggtgatcggccacactgggactgagacacggcccagactcctacgggaggcagcagtagggaatcttccgcaatggacgaaagtctgacggagcaacgccgcgtgtatgaagaaggttttcggatcgtaaagtactgttgttagagaagaacaaggataagagtaactgcttgtcccttgacggtatctaaccagaaagccacggctaactacgtgccagcagccgcggtaatacgtaggtggcaagcgttgtccggatttattgggcgtaaagcgcgcgcaggcggtcttttaagtctgatgtgaaagcccccggcttaaccggggagggtcattggaaactggaagactggagtgcagaagaggagagtggaattccacgtgtagcggtgaaatgcgtagatatgtggaggaacaccagtggcgaaggcgactctctggtctgtaactgacgctgaggcgcgaaagcgtggggagcaaacaggattagataccctggtagtccacgccgtaaacgatgagtgctaagtgttagggggtttccgccccttagtgctgcagctaacgcattaagcactccgcctggggagtacgaccgcaaggttgaaactcaaaggaattgacgggggcccgcacaagcggtggagcatgtggtttaattcgaagcaacgcgaagaaccttaccaggtcttgacatcctttgaccactctggagacagagctttcccttcggggacaaagtgacaggtggtgcatggttgtcgtcagctcgtgtcgtgagatgttgggttaagtcccgcaacgagcgcaacccttgattttagttgccagcatttagttgggcactctaaagtgactgccggtgcaagccggaggaaggtggggatgacgtcaaatcatcatgccccttatgacctgggctacacacgtgctacaatggatagtacaaagggtcgcgaagccgcgaggtggagctaatcccataaaactattctcagttcggattgtaggctgcaactcgcctacatgaagccggaatcgctagtaatcgtggatcagcatgccacggtgaatacgttcccgggccttgtacacaccgcccgtcacaccacgagagtttgtaacacccgaagtcggtagggtaacctttatggagccagccgccgaaggtgggacagataattggggtgaagtcgtaacaaggtagccgtatcggaaggtgcggctggatcacctcctttctaaggaaaaggaaacctgtgagttttcgttcttctctatttgttcagttttgagaggttagtacttctcagtatgtttgttctttgaaaactagataagaaagttagtaaagttagcatagataatttattatttatgacacaagtaaccgagaatcatctgaaagtgaatctttcatctgattggatgtatcatcgctgatacggaaaatcagaaaaacaacctttacttcgtagaagtaaattggttaagttagaaagggcgcacggtggatgccttggcactaggagccgaagaaggacgggactaacaccgatatgctttggggagctgtacgtaagcattgatccagagatttccgaatgggggaacccactatctttagtcggatagtatccttacgtgaatacatagcgtgaggaaggcagacccagggaactgaaacatctaagtacctggaggaagagaaagaaaaatcgatttcctgagtagcggcgagcgaaacggaaagagcccaaaccaagaagcttgcttcttggggttgtaggacactctatacggagttacaaaagaaagttataaatgaagcggtctggaaaggcccgccaaagacggtaacagcccggtagttgaaatagctttccctccagagtggatcctgagtacggcggaacacgtgaaattccgtcggaatccgggaggaccatctcccaaggctaaatactccctagtgaccgatagtgaaccagtaccgtgagggaaaggtgaaaagcaccccggaaggggagtgaaacagttcctgaaaccgtgtgcctacaagtagttagagcccgttaatgggtgatagcgtgccttttgtagaatgaaccggcgagttacgatttgttgcaaggttaagcggaaaaagcggagccgtagcgaaagcgagtctgaatagggcgcataagtaacaggtcgtagacccgaaaccaggtgatctacccatgtccaggatgaaggtaaggtaatacttactggaggtccgaacccacgcacgttgaaaagtgcggggatgaggtgtgggtagcggagaaattccaatcgaacttggagatagctggttctctccgaaatagctttagggctagcctcgaggtaaagagtcatggaggtagagcactgtttggactaggggcccttctcgggttaccgaattcagataaactccgaatgccatgtacttatactcgggagtcagactgcgagtgataagatccgtagtcgaaagggaaacagcccagaccaccagttaaggtccccaaatatatgttaagtggaaaaggatgtggggttgcttagacaaccaggatgttggcttagaagcagccaccattgaaagagtgcgtaatagctcactggtcgagtgaccccgcgccgaaaatgtaccggggctaaacatattaccgaaactgtggatgaacctctttagaggttcgtggtaggagagcgttctaagggcggtgaagtcagaccggaaggactggtggagcgcttagaagtgagaatgccggtatgagtagcgaaagaagggtgagaatcccttccaccgaatatctaaggtttcctgaggaaggctcgtccgctcagggttagtcgggacctaagccgaggccgataggcgtaggcgatggacaacaggtagagattcctgtaccagtgctaattgtttaaccgatggggtgacacagaaggatagggaatcgcacgaatggaaatgtgcgtccaagcagtgagtgtgagaagtaggcaaatccgcttctcgcgaagcatgagctgtgatggggaaggaaattaagtacggaagttcctgatttcacgctgtcaagaaaagcctctaggaagagtagtactgcccgtaccgcaaaccgacacaggtagatgaggagagaatcctaaggtgagcgagagaactctcgttaaggaactcggcaaaatgaccccgtaacttcgggagaaggggtgctctattagggtgcaagcccgagagagccgcagtgaataggcccaggcgactgtttagcaaaaacacaggtctctgcaaaaccgtaaggtgacgtataggggctgacgcctgcccggtgctggaaggttaagaggagtgcttagcttcggcgaaggtacgaattgaagccccagtaaacggcggccgtaactataacggtcctaaggtagcgaaattccttgtcgggtaagttccgacccgcacgaaaggcgcaacgatctgggcactgtctcaacgagagactcggtgaaattatagtacctgtgaagatgcaggttacccgcgacaggacggaaagaccccgtggagctttactgcaacctgatatggaatgtttgtaccgcttgtacaggataggtaggagccgaagagacgtgtgcgctagcatacgaggaggcaatggtgggatactaccctggctgtatgaccattctaacccgccacgcttagcgcgtggggagacagtgtcaggtgggcagtttgactggggcggtcgcctcctaaagagtaacggaggcgcccaaaggttccctcagaatggatggaaatcattcgcagagtgtaaaggcacaagggagcttgactgcgagactgacaagtcgagcagggacgaaagtcgggcttagtgatccggtggttccgcatggaagggccatcgctcaacggataaaagctaccccggggataacaggcttatctcccccaagagtccacatcgacggggaggtttggcacctcgatgtcggctcgtcgcatcctggggctgtagtcggtcccaagggttgggctgttcgcccattaaagcggcacgcgagctgggttcagaacgtcgtgagacagttcggtccctatccgtcgcgggcgcaggaaatttgagaggagctgtccttagtacgagaggaccgggatggacacaccgctggtgtaccagttgttccgccaggagcatcgctgggtagctatgtgtggcagggataaacgctgaaagcatctaagcgtgaagcccccctcaagatgagatttcccatttcttcggaaagtaagatccctgaaagatgatcaggtagataggtttggagtggaagtgtagcgatacatggagcggacaaatactaatcgatcgaggacttaaccaaaaaatgaaacgaagttacctaactgaacactttcttctctagttttgagagagcaatctttcaacaactcaatattgtctggtagttatggcgagaaggtcacacccgttcccatcccgaacacggtagttaagcttctctgcgccaatggtagttgggggcttccccctgcgagagtaggtcgctgccgggcaatttgaaaagtcctaattatttagggctttttttgtttgtaaaagataaataaattgctaataggtggggatatctagtataattaaagtcaaaaatagtcaaagtcaatgatttgcaaaaaacagaaaggagattccttataatgaaaaatatttctgatattatagaagcttatttgaaacaagtattggaatctagtgaagcagttgaaattaaaagaagtgaaattgcagataagtttgaatgtgtaccttcacaaattaactatgtaataaacactagatttacaatggaacgagggtatattgttgaaagcaaacgtggtggtggtggatatattcggattattaaagtgaaaatgaatgataaacttcaattgttagaagcaatcatttcaatggttcatgataaaaaggtctctcaatcattttctgaagatgttattttgaggttgcttgaagaagaagtaataacgaagaaagaagcaagattaatggttgcggcattggaccgtgaagttttaattttacctttaccggatagagatattttgagaagtaggattttagaggcgatgttagttgctttgaaatatgattaaggtgtgatgacgatgatttgtcaaagatgtggagaaaataaagcagttatagccttgcaacaattaaatgagcttgggaaagtggagtcattgtacctatgcgagaattgtgctacggacgaagctctctcctcagaaaaagatttagttaaagcgatggacacttttagtgaggttgctcttgatttcttaacgcttttgcaaaaagaggaaaatacgcagaaagaggttgtctgtgagaattgccagcttagttttgaagagtttttaaagactaatcgagttggatgtccggagtgttattcggcttttgaggcacagttagtaccgattattggtcgagtgcaaaatggatataaaaaacatattggtaaggttccagcagaagttgaacgagcggaaggtgtacaaaatgaaattagtcgtttacaagaaaagttagcaaagctagttaaaaatgaggagtttgaggaagctgctgttgtccgtgatgaaatcaaggctttgaaagctggaggtgaggataaatgaatgtatttgaaccgcggcttagttcttggttagaaaatgctggtgatgacgatgatgtcgttttaagctcacgtattaggcttgctaggaatttgaaggatgaacagtttccgatttatgagcagaaggaagagattgtcgataatattgccgaagtttttgatgataattttattttgattaaaatgaatcaaatttctttgttacaaaaggctcttttggtggaaaaacatttaattagtccttatatgatgaataagagtgaatatggtgcggttcttttaaatgaggaagaaaatgtgagtattatgttgaatgaagaagatcatttgcggatacagtgtatgacgcctggcttgagattattcgatgcgttagaggcagcgttgcaaattgatggttatgtggaagagaagcttagttatgcttttgataaagagtttggatatttgacgagttgtgtgactaatattgggactgggatgcgcgcttctgtgatggtacatttaccgggacttgtaacaacaaaaaggattaaaagtgtgattgaagcgattaggagcctaggttttgtggtaagaggtatatacggagaaggtagcatgcctgcaagtaatattttccaggtctcaaatcaagtaactctgggcaaaacggaagcagaaattgtggaagatttaactcaagtcatggaacaaattatcatgcaagagcgtgtcgctagaactacattgaagcaaaaatttcatattgcacttgaagatagagtttttagatcatatggtttattgatgaattgtcgaattatttctatgaaagaagctgcggatgctatttcggatatacgatttggtgtagaattaggatttttcgagcatatttctcgccaaaaaatgaatgaattggtactattctcgcaaccagcttttttgagaagagaagcaggacgagatatggatgaattagaagagaaagtaatacgggccaaagtgattcgcgagattttgggcgataaatgatgaggcttacgataaggaggaaacaacaatgatgtttggacgatttacgcaaagagctcagaaagtactcgcgttgtcacaagaagaggcgatgcgtttgaatcatagtaatttaggaacagaacatattttattagggcttgtaagagaaggcgaaggaattgcggcgaaagctctctatgaactgggaattagttctgaaaaagtgcagcaagaggtagagggattaattgggcatggggaaaaagctgtgacgacgatccaatatacacctcgtgcgaaaaaagtaattgaactttccatggatgaggctcgtaaattaggccatacttacgttgggacagaacatatcttacttgggcttattcgtgaaggcgaaggagttgcggcacgcgttttaagtaatcttggtattagtttgaataaagctcggcagcaagttctacagctcttaggcggcggtgatgctactggggcggggagacaaacaaatacgcaagctacaccgactttagatagtttggcacgtgacttaacggttattgctcgggaagataatttggatccggttattggtcgttctaaagaaatccaacgtgtgattgaagtacttagtcgccggacgaaaaataacccggtactcattggggaacctggtgtcggtaaaacagcgattgctgaaggcttagcgcaacaaattgttcgtaatgaagtacctgagaccttacgtggaaaacgtgtaatgacattggatatgggaactgttgtggcaggtacaaaatatcgtggtgaattcgaagaccgtttgaagaaagtaatggatgaaattcgccaagctggtaatgttattctatttattgatgagttgcatactttaattggtgctggtggggcggaaggtgcgattgatgcatcgaatatcttgaagccacctctagctcgtggagagttgcaatgtattggggcaacaacgctggacgagtaccgtaaatatattgaaaaagatgctgcgcttgagagacgtttccaaccgattaaagtagacgaaccaactgtagaagaatctattcaaattttacatggattgcgtgatcgttatgaagcgcatcaccgagttgcaattacggatgaagcacttgaggccgctgttcgtttatctgatcgctatatttcagaccgtttcttacctgataaagcgattgatgttatcgatgaatctggttctaaagtacgtttgaaatcttttacaacgccaaaaaatgtaaaagaaatggaaaataatttatccgatttgaaaaaagaaaaagatgcggctgttcaaggtcaagaatttgaaaaagcagcgtcattacgtgataaagaacaaaaactcaaaaaatcattagaagaaactaaagcgaattggcaagaaaaacaagggcttgaccatagtgaagtaacagaagatattgtcgctgaagtggttgctagttggactgggattccagttgcgaaacttgcggaaacagagacaaataaactgttaaatatggaaaaacttttacatgaacgtgtgattggacaagatgcagcggttaaagctgtatcgctagctgtacgtcgagctcgtgcaggccttaaagatccgaaacgtccgattggttcctttattttccttggacctactggtgttgggaaaacagaacttgcgcgtgcacttgctgagtcgatgtttggcgatgaggattcgatgattcggattgatatgtctgagtacatggagaaattttcaactgctcgtttagttggggctcctccaggttatgtaggatacgaagaaggtggacagctgacagaaaaagttcggcaaaaaccttattcagtagtccttttagatgaaattgaaaaagcacatccggatgtatttaatatgttgctacaagtactggatgatggacgtttgactgattctaaagggcgagtagttgattttagaaatacagttatcattatgacttccaatattggagctcaagaaatgaaacaagataaatcaatgggctttaatgttactgatccacttaaagaccataaagcgatggagcaccgcgttttacaagatttaaaacaggcgttccgaccagaatttatcaaccgaattgatgaaacaattgtattccattcgctgcaagaaaaagaattgaaacaaattgttactttactaactgctcaattaacaaaacgcttagccgaacgcgatattcacgtgaaattaactgaaggtgcgaaatccaaaatcgctaaagatggctacgatccagagtacggagctcgtcctttaaaacgggctattcaaaaagaagtggaagacatgctttctgaagaattgcttcgtggtaacattaaagtaggcgattacgttgaaattggtgtgaaagatggcaagttagaggttagaaaaaaagatgctcctaaaaagaaaacaacctctaaaaaagtaaaagctaaataagtagaaagccttccttaataaaaagttaagggaggttttttatgaaaaatcatgattcgcgtcaaaaaaacgaatttgatgaaaagggttaacgcgaacagatgatctgtggtaaaatggagcatatgtatggagggatgtataaatggctaaagcaaaaaggacaaccaaatttgtgtgtcaggcatgtggatatgaatcggcaaaatggatgggaaaatgtccgaattgcaacgagtggaatcagatggtagaagccttagaaccgtcaaaaaaatcacgctcagctttcaatcatacaggagagccttcaaaagcgactccaattactcaaatagcaagtgaaacagaaaaacgagttgaaacaaatatgcccgagttaaatagagttcttggtggcggtgtggttcctgggtctatggtacttgtcggaggagaccctggtattggtaaatcaacattgttattacaagtatcagcgcaactcacacttacaaataaaaaagtattgtatatctcaggagaagaatcaatcaaacaaacgaagctacgggcagaacgcttgcaagtttcgggagataatttatatgtgtatgcagaaacaaatttagaagcagttcaagaaacgattgattttgtaaaacctgattttgtagtcattgactctattcagactgtttatcattctgatgttacaagtgcagcagggagtgtttctcaagttagggaatgtacagcgacattgatgcgaattgctaaaatgcaaaacatcgctatctttattgttgggcatgtaactaaggaaggtgctattgcgggaccgcgcctattagaacatatggttgatactgtactctattttgaaggggagcgtcaccatgcttaccggattttgcgtgcagtgaaaaaccgttttggttccactaacgaaatgggtatatttgaaatgcgagatgtaggacttgttgaagttgctaatccttccgaggtattcttggaagaacgtcttgaaggcgcttcaggctcaacggttgtagcttctatggaaggaactcgccccgtccttgtggaaatacaagcgcttgtttcgccaacgatgttcggtaatgctaagcgaatggcgacgggaatagactacaacaaagtttcgctaattatggctgttttagaaaagcgagtaggtttaatgttgcaaaaccaagatgcttatttgaaagcggcgggcggggttaaattggatgagcctgcagtggatttggcggttgcagtcagtgttgcatctagttatcgtgataaaccaacaagaagtacggactgctttattggggaacttggacttacaggtgaaattcgtcgtgtagcaagaattgaacaacgcgtacaagaagcagcaaaacttggctttaagcgaatttttattcctaaaaataacgaaggtaattggaaaataccgaaagacgtgcaagtggttggggtggaaacgattggagaagctttgaagaaagctttaccagattaaaaataaatacttcgttgattccgtgagtactatttgcggtatagtcttttaatagtgtaaaatagtgctatatgtatatttggtaatagcccaattatacatataaatttaaaaatggaaaggaggaaactaaatgcttacatgggtaattcgagtgtgttttttaattctaggtgggacaacgggagtcttttcactacctgctctatgggtaaaacttggaataggtcacattctgctaattaataatccttatactgatgctctgattggtgcacttatattttatcttattactttctgggcggtgaaatatgtagaagccgcacttaattggttagaggaaaagttagctaaaattgctattgcaacccttgtttatgggggacttggtttatttgtaggtttggtcattgcgtttttcgcgagcaatgcattaagtcaaacaaatattccgcttttaaattcagtagtaccagttattttaacattagttttaggttatttagggttccgtatcggaattagtcgtcgtaacgaatttgggaattttgtcaataacagaaatgcaaagaaaagaacaccagaagaagagaaaacagaagagaaatctaagaaaacatataaaattttggatacgagcgtaattattgatggtcgtattgcagacattttgactactggatttttagatggaacggtggttattccactatttgtactagccgaacttcagcatattgcggattcatctgatacgcttaaacgtacaagagggcgccggggattagatattttaaatcgaatccaaaaggaagatgccattcaagtggaaatgtatgaaggtgattttgaagatacgccagaagtggatagtaaactggtaaaacttgctaaagtaatgggcggtatagttgttacaaatgattataatttaaacaaagtatgtgagtttcaaaatgtaccggttttaaatattaatgatttagcgaatgctgtaaaacctgttgttttgccaggtgagaaaatgactgttcttatggtgaaagatggtaaagaacacaatcaaggagttgcatatttagatgatggaacgatgattgttgtagaagatggtcgtaaatttattaatgaaacaatccaagtcgaagtaacgagtgtacttcaaacatcagcaggaagaatgatttttgctaagccatcctgattagaagggggaaatgagcatgaattatgagttggtttttttagcggcaggtcaagggaagcggatgaatgcccagaaaaacaaaatgtggctagagctagttggcgaaccaattttcattcatgccttgcgtccttttttagcggataatcgttgttccaaagtgattgttgtgtgtcaagaagaggaaagaaagcatgtaaaagaattaatgagtcagcttaatgtggctgagcaccgaattgagattgttaaaggtggaagtgagcgccaatacagtgttgcggcaggtcttgaacgttgtgggacggggcgtgttgtcttagtgcatgatggcgcaagaccgtttatcacgttagatattattgatcgattattaattggtgtagagcaaagtaaagccgctatttgtgcagtaaaagtaaaagatacggtgaaacgagtgatgaatggtgtcgttcaagaaaccgttgaccgtgaaaatctttggcaagttcaaacgccgcaagcctttgagctgcctattttacgaaaagcgcatcagcttgctcgaaaagaacagtttttagggacggatgaagctagtctggttgagcgaattccttgtcctgttgctattgtccaaggaagctattataatattaagctgacaactcctgaagatatgccgctcgcaaaggcgattttaggggaacttggagggatagcaaatgattagaattggccaaggttatgatgtacataaacttgcttatgaccgagaccttattattggtggggttaaaatcccttatgagaaaggattactaggtcacagtgatgcggatgtacttctgcatgctattactgatgctatcataggcgcaattggtgctggtgatattggtcattttttcccggacacagatatggtttttaaagatgcggattcagctgagctacttgcagaaatttggcagaaggtagaggcggatggttttcgtcttggtaatctagatgctactattattgctgaaaagccaaaaatggcgccatatgttgagcaaatgaagcttcgaattgcggagttgctacatgcggattcagcccaagttaatgtaaaggcgactacgacagagaaattagggtttactggtcgggaagaaggcatcgcaagtctagccgttgtcttacttgaaaaataattgaaggagtgaataattgtgagtgaaacaaaacgagtgcgtgtacgttatgcaccaagtccaactggatttttgcatattgggaatgcacgtactgccttatttaactatttatttgcaagacataatgatggagattttatcattcgtattgaagacactgatgctaaacgtaacatagctgacggtgaagaaagtcaaatgacaaacttgaaatggcttggtatggactgggatgaaggtgttgatgttcctggaaaatacggaccttaccgtcaatccgaacgtcaatcaatctatgagccgctaattcaagagcttttggataaagatttggcatataaatgctattgtacagaagaagaattagatgcagaacgtgaaaaacaaaaagcaaatggtgaaatgcctcgttatagtgggaaatgtcgtcatttaacaaaagaacagcaagcggagaaagaagcgcaaggttttaaaccgagtattcgtttcaaagtgccggcaaatgaaacgattactttcaacgatatggtgaaagacgatgtttcgtttgaatcaaatggaataggcgattttgttattgcgaaaaaagacggaattccgacttataactttgctgtggcagtggatgatcatttaatggaaatttctcatgttcttcgtggggatgaccatatttcgaatacgcctaaacaaattttgatttataatgcatttggctgggagccaccaatttttgggcatatgacacttattgtgaatgagagcagacgtaaattaagtaaacgtgatggttcgattattcaatttatcgaacaatatcgcgatttaggatatttaccggaagcattatttaactttatcgctatgcttggttggtctccagaaggcgaagaagaaattttctctaaagaagaattcattaaaatgtttgatccaaaacgtttatctaaatcaccagcgttgttcgataatgttaaattaacatgggtgaataaccaatatgtgaaaaaattaccgctaaatgatgtagtagagctttctttacctcatttacaaaaagcgggtgttgtatctgctgagctaaatcaagctgaacttgattgggtgcacaaattagtgtcactttatcatgagcaaatgagctatggtgcggaaattgtgccactttcagaaatgttctttgcggatgcagagtcaattacgtttgatgaagaagagacagcggtgttagcggaagagacagttccaactgttatttcggcattcaaaaaagaactagaagcactagaagttcttgaagctgcggaagtaaaagctgcaatcaagcgtgtccaaaaagaaacgggcgtaaaaggtaaaggtctatttatgccaattcgtatcgtaactacgggtgaaatgcatggtcctgaattgccacttgcaatcgaagttcttggtcgtgaaaaagtgctgaatcgtttggacacatggttgaaaaataattaattttgaatgaaagcatctcggctatttgcggggtgcttttttattttgatatatttcagttgcaaggaattttattgctgttataatagaactaaatatacggaaaaagtgctgatgggaagaagtacggaattctaggtttatagagagagtcgccaaggctggaagcgacttagctgaacactcctgaaatgcctccctgaattctgatgggaaatttagtatcgtcagacgaaatgtgggtcgttacccccacccctagagttggagtatctgctaaatttggcaatactcaagtcagagtggaaccgcgcaaagcgtctctgtatcggaggggctttttttgttggttaggttccaataaaaaatgtacgaacttgaataaggaggcaacaaaatgccaactcgcttaaaagaagatattgcaacaattataaagaatgaccctgcgacgaagagcttttttgatgcttttttaacaaatccgggattgcatgcgctttggtggcatcgtgtggcgaactttttttatcgtcacaaaatggttttgtttggaaaagtattatcgcagaacgctcgtttctggactaatatagagattcatccaggcgcaactattggtagaaggctttttattgatcatggtgcaggaattgttattggtgaaacagcagaaattggggatgatgtaacgatattccacggagttacgctaggtggaactgggaaagattgcgggaaacgccatccaactgtcggtgacggggcgctcgtttcggcgggagcgaaagtacttgggccggtggaaattggagcaggagcgcgtattggagcaggagctgtcgttttaaaagatgtgcctcctggagcgacggttgtcggaattccagccaaagttgttcgcttgaatggtcgtacagtagggcacgcggttcctaaaatggatgaactgacgttacgaattgcggaattagaaaatatagtagaaaaacttttgaaggaaaaggagtagatctgattgtcgatacaaatttttaatacgttaaaacgagagaaacagccttttaaaccactcaaagatggtgaagtgaaaatgtacgtttgcggacctactgtgtataactacattcatatcggaaatgcgcgaccaattattgtttttgatacggttcgacgttattttacgtatcgtggttatgatgtgaaattcgtgtctaattttacggatgtggatgataaattgattcgtgcggctaatgaacttaaattgacagttccggaagtggcagatcgctttattggtgcttattttgatgatgtcgatcagctgaatgtggcgaaagctagcgtgaatccgcgtgtaacggaaaatatggatgaaattatccaaatgattagtacgctaatcgaaaaaggctatgcgtatgagtcggctggtgatgtgtatttccagacgaaaaaattcaaagattacgggaaactctctggccaagaattatcggaattgcagcacggggctcgggttgaatataatgagcgtaagcaagatgagcttgatttcacgctttggaaagcggctaaaccaggtgaaattttctgggaaagtccgtttggtaatgggcgcccgggttggcatattgaatgctcggcgcttgcgaaaaaatatctgggtgacacgattgatattcatgcgggtgggcaagatttagtatttcctcaccatgaggatgagattgctcaatctgaagcggcaactgggaaaacgttcgcgaactactggatgcataatgcctttttaaatattgatggggaaaaaatgtccaaatcacttgggaattttattacgcttcatgatgtgctgaaagataatgacccaaatgtgattcgtttcttcatgttatctgtacattaccggaagccaattacgctgaatgatgcgattttagaagatgcgaaaaatggtttggaacgattaatgattgcataccaaaatattgatcatcgtattcaaacagatgacggtgaatatgtggaagaagcgcatgaggacgagtggctagaacaactaacggaattaaaacaagcttttgaagatgatatggatgatgatttcaatacagcaaatgcaattactactttccacgaacttgcaaagcgtgccaatatttacttggcgaaagaaactgtttctatcaacgttctgcgcgaattcttaagcatgatgcgtttgtttgcggaagtgctaggtttaaaattagagaatacgcaaacagattcgctggacgatagcgaggtagaagcgttaatcgaagaacgtctgcaagcgcgaaatgaacgcaattttgcacgtgctgatgaaattcgagacattttaaaagaaaaaaatattatcttggaagacactgcgcaaggcacgcggtttagacgggggtaaatcatggcagaagtgaaagaatataaacaactgaatggtctcgcacttgcttacatgggtgacgcggtgtatgaaaaatttatccgtgaatatttacttgctgctggaaagacaaaaccgaatcaattgcacaaaacggcgacaaaattcgtttctgcaaaagggcaagctgtggcgctaaaagctatgattgcggaaggctttttgacggaagaagaagatagaattgcaaagcgtgggcgtaatgccaagtcgtatacagtgcctaaaaatactgaccctggaacttacagtatgtccacatcttttgaagcggtgctaggttatctttacttagccggtgaaatggaacgtttacaagaatggatggaaaaggcgcttgaaatagtagaaaaaggagtggaaaccaactaatggaacaagaaaatgagcaagagtggattggcgggagaaatcctgttcttgaagtattacgatctgatagagatatccataaaatatatgtgcaagaaggttcacaaaaaggtgttttaaaacaagtgttaacattagcgaaagaacggaaaattcaagttcaatttgtacctaaacaaaaaattgaaaaagtagtaagtggcgcgcatcagggtgttgcagcccaagtggcagcttatcaatatgcggagcttgatgatttattcgctgctgctgaagcaaaagatgaaatgccatttttcattattttagatgaactagaagatcctcataacttagggtcgattatgcgtacggcggattctgttggcgcacacgggattattattccgaaacgccgctcagtgggattaacgcaaaccgttgcaaaagctagtactggcgcgatggagtatgtaccagtggttcgcgtgacgaatatggtgcggacaatggaagaattgcaaaaacgtggattatggatttttggaacggatgcgaaaggtagtagcgattaccggacgatggacgttgatatgccgctcgctattgttattggtagtgaaggttttggaatgagccgtttagttcgcgaaaaatgcgattttcttgttcatttaccgatgcgtggaaaagttacatcacttaatgcgtctgttgcagctagtttattactttatgaagtttatcggaaacgtttccctctggagaaataaagatggaacaaattctgcttgttgacgggtataatgtgattggggcttggccagaattaagttatttgaaagatcgtgatttggaagcggcgagagataagcttgttgaatggatggcggagtatcagagttatacgggataccgggttgtggtcgtgtttgatgcgcagtttgtccgaggtgtgaagcggaaaagcaagaaatatcaagtcgaagtagtttttacacatgaggatgaaacggcggatgaatatattgaacaaaaagcaattgaatggaaaaatgtgcggacgcaaattatggtagcgacatctgactatacagaacagtgggctatttttggacaaggagcgttacggatttcttcgcgagaactactttttgaaattcaagaaatgagcaaacaaatcggtaagaaaatcaagcgaattcaggaagaaatgccaaaatccaaccttaatctagattctgatgttatttcgcagcttgaaaagtggagaagaggcgaggagtaagggattgacggtatgtttttgactatgtataatggagcaaccatagaagaaatcctgtcgtaaaggagccgattagcctagtggataattcagtgaatcaagaagaacttgcgatgctcgaactagcgagaagcggtgatacagaagcgttagaatattttttcagtaagtatcaatcggttatttactggaaatcaacccaatattttctgcaaggtgcggagcgggacgatttaatccaagaagcgatgattggtcttttcaaagcaattcgggattatgataaaaccaaagaagcttcttttcgatcttttgcagaaatgtgtattaacaggcagctactttcggcggtgaagcgggcgtctagacagaagaatattccgcttaataattctgtttcactcgatacaccaatggctgaggatgatgtggactggactttattagatgtgatttccgaaaaagcagccgaaactccagaagactttttaatcaaaaacgaagatttaacgcatgtagcacgtcaactagaacaagtcacaagcgaatttgaaaaagaagtattaaaacagtatttagaaggtaagagctatcaagaaatggcacttttcttcaacaaaaaagagaaagcaatcgataatgccctacaacgcgtcaaaaagaaaatgatgaaacagctagaatgaaaaaacaattgactagctaagagccaaatgttatatttatatggatgaaatgtgcctattttttggcatggcatatttaatgattgcggagttgagataatttatgaagaagaaaacatccctcgcttgttctgagtgtggttcaagaaactatacagtcaatgttagcgggacgcagaaagaaactcgcttagaagtgaagaaattctgccgacactgcaataaacatacattacatcgagaaacaaaatagacgatatggaggttttggtatgtctgcaatagcaaaattctttcggaatgtttcatccgaaatgcacaaagttacgtggccaactagaaaagaacttttaacctacacagtaacagtagttattacagtagttttatttgctttattctttatgttaattgatttcggtatcgaacaaattattaaacttatcgtgtagtgctaggaattttacaaagataatgatatactattacttgagacaaaacccgtacaactttcgggttttttattttggattatactaaaaggaggatggcggcaaaataggattgctgccaactaaacaatggaaaaaaattggtatgtagttcatacttactccggttatgaaaataaagtcaaagcaaacttagaaaaacgtgtagaatcaatgggcatgtcagataaaatctttcgcgtgatcgtaccggaagaagaagaaacagaagtgaaaaatggtaaaacaaaaacaattaaacgtaaagttttccctggttatgtactagtagaaatcgttatgacagatgactcttggtatgttgttcgtaatacccctggtgttacaggattcgttggttcagcaggttctggatcaaaaccaacaccattacttccagaagaagcggatcgtattcttaaaagcatgggcatggtggaaaaacgtgcggaagctgactttgaaattggtgaaacagttatggtcaaagaaggaccattcgctgacttctccggtaaagtggacgaaatggacaacgacaaaggtaaagcaaaagtcatggttaacatgtttggacgtgaaacgccagtcgaagtggatttcaaccaaatcgaaaaactttaaaatgtgcaacctctacattatttgtggaggttgttttgttagggaggcgaccaaatggacaaagcaaagcaaatttatctggagtttaaacgagaagccgattttttagagctcgatttcccattgttcttaggtgatggtccaggtttcggcgagctttgtatggattatagtgaacaagatggttacatgctatatgggtatgaacacgggaaacgtaacagtgaatttaaaacaacagactttgacgaatttaaatatgaggttttcttgcatatttgttggtatatgggaatggagtttgaactgcgtcaccgcaaagaagatatcgaacgcgatgataatatcctagaaacagataccagaaaaattgcttttgaaaaaacattgcaactactaaaaatggtgaatccggcgtggatagataaggcagcaattggctactcgaactatttgaacttatggcgaaaaaataaaaatgtatatttcgataaagaagctatgcagttcaaagtgaatttataaaaaaatcttgcaactatacatttaaaatggtatcatatataagtacgtttttgacgtatgttttaacgtgggaggggaaatatcagccccagtcaaccacatcacggacttaaggaggtatgtctcgtggcaaaaaaagtgattaaagaagttaaacttcaaattccagcaggtaaagcaaatcctgcacctccagttggacctgcattaggtcaagctggcgtaaacatcatgggattctgtaaagagtttaatgctcgcacagccgatcaagctggtcttattattcctgttgtgatcactgtatttgaagaccgttcgtttacgttcatcactaaaactccaccagcagctgtattacttaaaaaagcagctaaagtggaaaaaggatccggtgaaccaaacaaaacaaaagttgcatctgtaactcgcgctcaagtacaggaaattgctgaaacaaaaatgccagaccttaacgctgcaaatgttgaatctgcaatgctaatggttgaaggtactgcacgttctatgggtatcactatccaagactaatcgtgtgtttcacaatttgacaattaaggaggaaaagaaatggctaagaaaggcaaaaagtatcaagatgctttaaaacaaattgatgcaaacaaagtttacactgcagaagaagcagttgaacttgctaaaaaaattgacttcgctaaattcgatgcaactgttgaagtagcattccgtcttggcgttgaccctaaaaaagcggaccaacaaatccgtggtgctgttgtattaccaaacggtactggtaaaactcaacgcgtattagtattcgcaaaaggtgaaaaagctaaagaagctgaggctgctggagctgattacgttggtgaatctgaattcgttgaaaaaatcaaccaaggttggtttgactttgacgttatcgttgctacacctgacatgatgggtgaagttggtaaattaggccgtgtccttggaccaaaaggtttaatgccaaaccctaaaactggtacagtaactatggacgtaactaaagcagttaacgaaattaaagctggtaaagtagaataccgtgttgataaagctggtaatgtccatgctgcaatcggtaaagtatcttttgatgctgctaaactagtagaaaacttccgtactgtgaatgacgttctacaaaaagcaaaacctgctgctgcgaaaggtacttacgtgaaaaatctttccgtaacaactactttcggacctggaatcaaagtcgacccagcaagcttataaaatttaacttgaccagccccttgtcttttgataagataggctagttgaaacaatcaaatatccttaccgtagacagttggcgcgtttatcgcttaaatttgccacccgagggatttcttttgaagtgtgcgtccgcgtgcattttacaaaaacctctgacgtctacggtgtcagaggttttttgttgctgatcaaacggaacttgtgtctgtttaattagatttaattgttggacggaggtggaaaaatgagtaaagttcttgaagctaaacaaagtgcagtagaagaaattaaaacaaaattatcagctagtgcgtctacagtaattgttgattaccgcggcttaaacgttggcgaaatcactgacttacgtaaacaattgcgtgatgctggtattgagtttaaagtttacaaaaactcactaactcgccgtgctgttgaagctaacggttacgaaggtttagaaggagctctaactggtcctaacgcaatcgcattcagtaatgaagacgtagttgcgcctgcgaaaattcttaacgatttcgctaaagatcacgaagcactagaaatcaaagccggtgttattgaaggtaaagttgcttctcttgaagaaattaaagcacttgcaacacttccatcacgcgaaggattgctatctatgctttgcaacgtacttcaagctccagttcgcggtcttgctatcgctactaaagctgttgctgaccaaaaagaaggacaagaagcataatctgttctacccaggggaaaccctacaaacaaatctcggttaaatccgaaaaaattatattattggaggaatttcaaaatggctttaaacattgaagaaatcattgcttccgtaaaagaagcatctgtattagaacttaacgatttagtaaaagcaatcgaagaagaatttggcgtaactgctgctgctcctgtagctgtagctgctgctggtggagctgctgctgagcaaactgaattcactgtagaactagcttctgctggagattctaaaatcaaagtaattaaagtggttcgtgaaatcactggtcttggcttaaaagaagctaaagaattagttgacaacgctcctaaagctcttaaagaaggcattgctaaagacgaagctgaagaaatcaaagctaaacttgaagaagttggcgctaacgtagaagttaaataatttattttaaagcccttagatacttgttatctaagggctttatttatttttagtaattgagtgctttcgaatgaggaattaatcctttagaaggcttttttttattggtattacatgctagtataaagagatggattagttttctgggggtttatatatggcaattaaatctatatcaaaatctgaattagaagtaatgaagattatatgggattttggaagagcggttcagtatgctgatgttgctggaaagctagaagagaaaaattactcgtggaagaaaaatacagtactaacttttttaacgcgcttggttgagaaaaatttacttagtgtgaagaaagttggacgcaaaaatgaatattatgcgcttgtaagtgaaaacgagtatttagaacgacaaacggaaacctttgtggaagagatttatgaaggcgatgtaaaaggattaattacgaatttagtacaaaatgatttaatttcaccagacgaactagaagatttacaacaattttggaaaaggatgaaatcacctaatgaatgaactgcttaagattttcttatcaatggctttaacatcagttatattaataccgctagtctggatattacggagaatattcaatcgttatttgagtaaaggaaaaatttattactcatggctgattgtttttttctttttaactattccttttgcctatatcttctttagttttacaaaagataatgcgtttatgtggagaaataaaacggaatttgatggggttacttctatcgtaatggatcaaagtgggattgtattacaacatgattttaaaactgttttttggatgacggtacttgattatatatgggtagcttggctcgtgatatttttactaacttttatttaccgtatagcttcgtatcgtaatttcaaaaaatatgtattttctggtgcgcgaagagtagatgatttggaacagctagatatattggcggaaaccattgaggaattgaatattaaacgaccggtagagttgatgataaatccacttatttcttcgccgatttttcttgggctaaaaaagaatgtaatagttataccagatgaaactttttcaaacgtggaattgcattatatttttaagcatgagctcgttcattgtaaacgtaaagatatgtattatgtttggatggtccaatttttcacttgtatctattggtttaacccgttgatgtatctgatgaataagcggattcaaatggatcgtgaattagcgtgtgatgaagctgttttagctacattgtcgaaaagtaaatatattggttatggcgatacgttgctttcgtcacttgctaaatcaggaaattacaaggaatcttatgtagccgtatcgcttcatgaaaatacgaaagctttaaaagaaaggcttatgtttatcgcgaactataaagcacaaaacaaaaaacataatatattgttctcgatttccatgattgtattatgtattgtaggcgtcttatttagtgcttttcaagctgatgtgtttacgctggaaaagaagaaaggcattacaattgaacgaagaaaataagctagtagaaacttctcttttttgataagaggagtttttttattatgatattgacttttaaaactacatgttgtagtattgaaaagcataatatattactagaagggcggagaagaaatgtttggtcgaaaaaaggtttctataccagaggaatatcagcgatttaatcaattttcagcagataaagagagattgctttgcataggagctttcactacagagtgtaaacataaagtagaaacaaaattagatggttcgaataaaatgctgaagctatattatccgaagaatcaagctgcaaaagtcatgaaatattggttgccgatgtttgggattaatgatggctattctgctgtagaggtaatcactaactggattcaagcaaatgattattcaggaatgattgctgcaaatacaacaaataaagttattcgaattgttactaaagcttctcaaaaagaagggctagatgaaacttcacttgtagcagctgctaacaaagtgaagacgtatggcgcatttgatttagatagattaggttatattgtgcgtgtctgctattctttagacttgatcaatgaggagcaagcgtgggacttctttgaagaattatggggcgctgcgacaatgcattttgatgactgggatgagtactgcgttagttatttgaacggagaagaaggtttggatacaaactggtacagtgacggtgttaaggcctatgtggcattacgaaaagacgcagctagtttgttaaataaatatcaactaaaaaactaaacaaaaaagggagtacagcaatcaatgaaaaagtttttaagtatcttaagtattttagttttggctttacttgtaacagcatgtggaagtgattcaagtgataagaaaagtgcgaaaaaagaagaaaaaatggagacagtaacatatatagcggacattaatggcgctaagttagaagcaactttttctcacgtaggtgataatttgagaaaagtagatcaaaaaatggtttatccgttgactgctcttggattagaaagtggcgctaatttagatgatgctacgaaaaagcaattagaagagcaagtcgcttcccaatactctgcatataaagagagcaaaggagcttcactagaaacgaaatttactgatgaagcgctagaattaacaatgtctgttgatttatataaagcagataaggattcagttgcttccttacttggtggaactacagatcctaaaaatgttagtctaaaagaaactgtaaaacaattcgaagctcaagggttcaagaagaaagaatcttaataacatagaaacagacgcttaataattaaagcgcctgtttttctttcattagcgctactttagaaggggattttatgctaaaatagctagagatacgaaaggaaggtgcggttcttgactaacaatcattactacacaaacgacgaaacaattaaacacaaccgaaaaacatggcaagtgatgttaaaaggttttaatatgagttttacaagtgacaatggcgtgttttccaaaaacacagtcgattttggttcgaaattattgattgagtcttttgagttagaaacgaaaataggaaaaatcttggatgttggttgtggttatggtccgatggggttaacggtagcgaaagcgttccctgatagccaaattgaaatggtggacgttaatttgcgcgcactagaacttgcgaaagaaaatgcggaaatcaataaaattacgaatacgcatatctatgaaagttcggtttatgataacgtaactgcgaacgactaccaagcgattattagtaatccgccaattcgtgcagggaaaaagatagttcacgcgattttagaaggtgcttacgatcacttgcaagaaaccggagaactttggattgttattcaaaagaaacaaggtggcccatctgctgaaaagaaaatggaagaagttttcggcaacgttgaaacagtcgcaaaagataagggctattttattttcaaaagtgttaaaaattaagttgtatcaagtgcggaaacatgctaatatagaaatacattttactaagaaaggactgagggatatgcttagaatgaaagatatactagaaaaaaacaaccaatcaagacagaagataataggtatttctttaacgttcctgcatagctcaccggtgtcttttcaaggtagcgtccgttaaaagttacgtccttcaatctttcttgattgagggactttttttatacctaaaaataaatttgaaagaagtgagtcgaatgacaataggagaactggagaattttaacagctaggaagagaagtggagactttcatttctctattaaacagaaaatgaggaatagaaatgctaacattaaaaggaaaatataacgaagcgaaagtttttacagataatgtggacgacaataccatcgggcaaattattacgctgtgtaatcaaccgtttgcgaaggatagtaagattcggatcatgcccgatacgcacggtggtaaaggttgtgtgattggaacgacaatgacaattcaagataaaattgtaccgaatttggttggagtggacatcggttgtgggttgtatgtagtgaagctaaaacctggcaagttaaaaatggattttgataagctggataaagttattcgcgaacgggtgccatctggaagcaaaacgcacgataagcctgtagatgaatttgatttggaaggtatagttgcgccaattcatcacggctgggtagctagaagcatagggacgcttggtggcgggaaccattttattgaggtgaatcaaggctctgacggtatttaccttgtaatccatagtggaagtcgggtgcttggtaaagaaatcgcggaatatcaccaagaggtagcttataaaagattagacatattgcgtaaagaattaaaattagatgcaactgctgcgaaaaaacgtggcaatttagaaatggctaataacttgaacggtgagcgcgaacaagtgaagttggattacgatttatcttatgttactggtgtggatttaaaaaattatttaaatgatatggaaatcgcccaaaaatttgcggcacgtaaccgctatgtcatggcgcaaataattttaaaagcgatgaaatgggataaagcggtcgtttctgcatttgactgtgtgcataattacattgatatcgaacacaacatgcttagaaaaggtgcgacatctgcgcaacttggtgaacaaattatcgttccacttaatatgcgtgagggtagtattcttgcaactggtaaaggaaatgctgattggaattactcggcgccacacggggcaggaagaatgctaagtcgctccaaagcaaaagcgcaaatcagtttggaaagttatcaggcggcaatgaaagacgtttggactacttcggtttcgaaaaaaacaatcgatgaagcgccaaaagcctataaatcagctaaacaattacttgctgatgtagaagatacaatggaaattcaagagataattaaacctttatacaacttcaaagcgtgatcaaaaagaagcggcaaatattataacatgccgcttcttctttttctagaaaaatatttgacataggcatagagatgttgtattatagtataatgccaaaagaatctataccgtttttttgcgctgcattttatttcaaaatatgatgaaaaatgaagcgtttgcgcggtttttggtgctataaataaacatggacgtggttttcagaaatatatgatgaaatccgctttctttttgtctaaagcagcaattttttctttttgaagttccacttgatttccaactaggttttatctgattgcgactatgcgaatcagatgtacacgaggtagcaggaaacttttgatgaacgatgtttaaggctgatgaaggggtatggaagtacttgcttttgaacgatttaacttaaacatcgggtgcggggggttccactgtttttgtgcctaaaagtgaagtcggtgtgcttataaattttttaattaatttgaggggtgaatagtttgtcaggacattcaggacatgatgtaaaatatggacggcatcgtacgcgtagaagttttgcgcgaatcagtgaagtacttgaattaccaaacttaattgagattcaaacagcttcttaccaatggttcttagatgaagggctacgtgagatgttccgcgatatttcgccaattgaggattttgcgggtaatttatctttagaattcattgattacgatcttggagagccgaaatattcggtagaagaatctaagaaccgtgatgcaaactatgcggctccactgcgcgtgaagttgcgcctaatcaacaaagaaaccggcgaagtaaaagaccaagaagtatttatgggtgatttcccactaatgactgaaatgggtacgttcattattaatggggcagaacgtgttatcgtttcccagttagttcgttctccaggtgtttacttcaatggaaaactagacaaaaatggtaaaaaaggctttggttctactgtcatccctaaccgtggggcttggcttgagtatgaaacagatgctaaagacgttgtacacgttcgtattgaccgtacacgtaaattaccagtaactgttttacttcgtgcactaggctttggttccgatcaagaaattattgatttaatcggggacaatgactacttgcgcaacacgcttgaaaaagacaacactgacaatgctgaaaaagcacttctagaaatttacgaaagattacgtccgggtgaacccccaacagttgataacgctagaagcttactagtttctcgtttctttgatccaaaacgctacgatcttgcaagcgttggacgttataaaatcaacaaaaaattacatctgaaaaaccgtctattcaaccaaacattagcagaaactttagtggatccagaaactggtgaaattatcgcttctaaaggtgacatattggatcgtcgtaatttagatcaaattattcctaatttagaaaacggtgtaggtttccgcacacttcgtccaactgatggagtgatggaagatagcgtactcgttcaatctattaaaatttacgcaccaaatgatgaagaaaaagaaatcaacatcatcggtaacgcgtatatcgaagaaaacgtaaaacacatcacgccttctgatattatttcatccattagctacttctttaacttgctacatggtgttggcgatacagatgacatcgatcacctaggtaatcgtcgtcttcgttctgttggtgaacttttacaaaaccaattccgtatcggtttatctcgtatggaacgtgtggttcgtgaacgtatgtctattcaagatatgactacaattacaccacaacaattgattaatattcgtccagtagttgcatctatcaaagaattttttggtagctcgcagttatctcagttcatggatcaaacaaatccacttggcgaacttacgcataaacgtcgtctttcagcgcttggacctggtggtttgacgcgtgaacgtgctggttatgaagtacgtgacgtgcattactctcactatggccgtatgtgtccgattgaaacgccagagggaccaaacattggtttgattaactccctttcttctttcgcaaaagtaaataaattcggctttatcgaaacgccttaccgccgcgtagatcctgaaacaaaccgtgttacagataagattgattatctaactgcggatgaagaggataattacgtagtagcgcaagcgaactcgaaattagacgaacaaggtactttcacagaagaagaagttatggctcgtttccgttcagaaaacttagcggtagaaaaagaacgtattgactacatggacgtatcgcctaaacaggttgtatctgttgcgacagcatgtattccgttccttgaaaacgatgatagtaaccgtgcgctaatgggagcgaacatgcaacgtcaagcagtacctcttatgcaccctgaagctccatttgttggaacaggtatggaacacgtatctgcgaaagactctggtgctgctgtaactgccaaacatgacggtattgtagaacacgttgaagctcgcgaaatctgggttcgtcgtgtatctctagtggatggcaaagaagtaactggcggaatcgataaatatactttacgtaaatttgttcgttctaaccaagggacttgttataaccaacgtccaaacgtagcagaaggagaccgcgttgttaaaggagaaatccttggtaacggtccatctatggattccggtgaacttgcacttggtcgtaacgtactagttgcgttcatgacttgggatggttataactacgaggatgcgatcatcatgagtgaacgtcttgtaaaagatgacgtttatacttcgattcatattgaagaatttgaatcagaagctcgtgatacaaaactcggacctgaagaaatgactcgtgatattccaaatgttggggaagacgctttacgtgaccttgacgaacgtggaattatccgtgttggtgcggaagtaaaagacaacgaccttctagttggtaaagtaacaccaaaaggagttactgaattaactgcagaagaacgtttattacacgctatctttggtgaaaaagcacgtgaagttcgtgatacttcattacgtgtacctcacggcggcggcggaatcgtgcttgacgtgaagatctttacacgtgaagcaggcgacgaactaccacctggagtaaaccaattagtacgtgtttatattgtacaaaaacgtaaaatccatgaaggcgataaaatggccggacgtcacggtaacaaaggggttatctcccgtattttacctgaagaagatatgccatttatgccagacggaacacctgttgatatcatgcttaacccactaggggtaccatctcgtatgaatatcggacaagtacttgagctacacttaggtatggctgctcgtgctttaggaattcacgttgcaacaccagtatttgatggtgcgaatgaagaagatgtttggagcacagtggaagaagccggtatggcccgcgatgcgaaaacaattctttatgacggacgttctggtgaagcattcgataaccgtatctctgttggtgtaatgtacatgatcaaacttgcccacatggttgatgataaacttcatgcacgttcaactggaccttactctctagtaacgcaacaacctcttggtggtaaagcacaatttggtggacaacgttttggggaaatggaagtatgggcacttgaagcatatggtgccgcttatactcttcaagaaatcctaacgattaaatccgatgacgtggttggtcgtgtgaaaacttacgaagcgattgttaaaggcgaaagcgttccagaacctggtgtgccagaatccttcaaagtactcatcaaagagcttcaaagtcttggaatggacgttaaaatgctttccgcagacgaagaagaaatcgagatgcgtgacatggatgatgatgactttactaatcaaaatgatgccttcaatatcgtacaaccggaaaatgcagccgctgaaaagactgagtaattcggttcgataattgagactccaaaacaataagaaacaatgatttgttttttgcaaaatataaaattaagcgatcgctaagactttacctgaaaagtctgggaagtgtgcgggaatccccaagcgcttcctaaagcgaatgctccaaactaatttaggaggttgggcacttgttagatgttaataattttgagtatatgaaaatcggtctggcatctccagataaaattcgttcatggtctcatggtgaagtaaaaaaacctgaaaccatcaactacagaacgcttaaacctgaacgtgacggcttattctgtgaaagaatttttggaccaatgaaagactgggaatgttcttgtggtaaatacaaacgtgttcgctataaaggcgtagtttgtgaccgttgtggagtagaagtaacgaaatcaaaagtccgtcgtgaacgtatgggccatattgaactcgcagctcctgtttctcacatctggtacttcaaaggaattccaagccgtatgggtcttgttatggatatgtccccacgtgcattagaagaaattatctactttgcatcctacgtggttacagaaccaggcgatactccacttgaaaagaaacaacttttatctgaacgtgaataccgcgtttaccgcgaaaaatatggtaaaggtttctcagctggtatgggcgcagaagctatcaaaaaaatcttagccgatatcgacttagaaaaagaaacaaatgatttaaaagaagaactaaaatccgcacaaggtcaacgtcgtactcgtgcgattcgtcgtttggaagttatggaagctttccgtaattccggcaacaacccaagctggatggtacttgacgtgctaccagttatcccaccagaaattcgtccaatggtacaacttgaaggtggccgttttgcaacaagtgatttgaatgacttatatcgtcgggtaatcaaccggaacaaccgtttgaaacgccttcttgatctaggtgcaccaaacattatcgtgcaaaatgaaaaacggatgctacaagaagctgtcgatgctttaattgacaacggtcgtcgtggtcgtccagtaactggtccaggtaaccgtccgcttaaatccctttctcatatgcttaaagggaaacaaggtcgtttccgtcaaaacttactaggtaaacgtgtcgattattctggtcgttccgttatcgtagttggacctaacttaaaaatgtaccaatgtggtcttccaaaagaaatggcgcttgaattattcaaaccatttgttatgaaagaactagttggacgcggcttagcacacaacattaagagcgctaaacgtaaaatcgaacgtatggctccagaaatctgggacgtattagaagaagttattcgtgaacatccggtattacttaaccgggcgcctacgcttcacagacttggtattcaagcatttgaaccaacgctagttgaaggtcgcgcaatccgtcttcaccctcttgtatgtacagcttacaacgctgactttgatggtgaccaaatggcggttcacgttcctttatccgcagaagcacaagcagaagcacgtattttaatgcttgcagctcaaaacattttgaaccctaaagatggtaaaccagttgtaacaccttcccaagatatggtgctaggtaactactaccttactttagaacgtgaaaaagctgtcggcgaaggtactatcttcaaagatatcaatgaagcacaacttgcgtatcaaaatggctatgtacacttacactctcgtattgctgtatttgctggttcgattccaaatgaacgtttcactgatgaacaacgcaaccaattattaattacgactgttggtaaattgattttcaacacaatcttaccaaaatcgttcccttatattaatgaaccaacgaaatttaacttagaaatcgaaacaccagctaaatatttcgttgatacaacaactgatgttcgtgctcatattgctgcacaagaactaattgatccattcaagaagaaaatcctcggtaacattatcgcggaagtcttcaagaaattccatattaccgaaacttcaaaaatgcttgaccgtatgaaagatcttggtttcaaaatctcgactaaggccggcatgacagtaggtattgcggatatcttaacacttgaagaaaaacatgaaattcttgaaaaagcacatgatacagttgaaaaaatcactaaatcattccgtcgtggtttgattacagatgatgaaagatacgaacgcgttatcgctgtatggaatgctgccaaagatgaaatccaaggaaaactgatcttgagtttggatcgcttaaacccaatcttcatgatgcaagattccggagctcgtggtaacatctccaactttacacagcttgctggtatgcgtggactgatggctgacccatccggacgtatcgtagaattgccgattacatctaacttccgtgaaggtttaacggtcttagagtacttcatttctacccatggtgcgcgtaaaggtcttaccgatacagcccttaaaacagccgattccggttaccttactcgtcgtcttgttgacgtggctcaagatgttatcattcgtgaagacgattgtggcacagaccgcggtcttacaattaaggctattcgtgaaggtactgaaatcatcgaaccacttgaagaacgtctggaaggtcgttattctcgtaaaacaattcgtcacccagaaacaaaagaagttattgcacgtgaaaatgacttaattacagaagcaattgccactcaaatcgttgacgcaggcattgaagaagtaactatccgttctgcattcacatgtaatacaaaacacggcgtatgtaaaaaatgttatggtaaaaacttggcaactggtacagaagtcgaagttggagaagcagttggtatcatcgctgcccaatctatcggggaaccaggaactcagcttactatgcgtacattccatacaggtggggttgccggagacgatatcacgcaaggtcttccacgtattcaagaaatctttgaagcacgtaatccgaaagggcaagctatcatcactgaagttggcggtgaagttgtttctatcgaagaaggtcgtgatcgtcaacaagaaatcactatccaaggtacagatgaccgccgttcttacaacattccttacactgctcgcttacgtgtagaagaaggaactattgttgaacgtggggaagctctaactgaaggttctgtggatcctaaagccttgattcgtgttcgtgacgtattatccgttcaagaatatctacttgcagaagtacaaaaagtttaccgtatgcaaggggtagaaattggcgataaacacgttgaagtaatggttcgtcaaatgttacgtaaaatccgcgtaatggatactggtgatacaaacatcttaccaggtacattaatggatattcatacgtttacagaagccaaccgtgaagctatcttaagtggtagccaaccagcaacaggtcgtccagttcttctagggattacaaaagcttcccttgaaactgattccttcttgtctgccgcatcattccaagaaacaactcgtgtcttgacagatgctgcaatcaaaggaaaacgtgacgaacttctaggacttaaagaaaatgttatcctaggtaaacttgttccagctggtacaggtattggtcgttaccgcaaactgaaatccgaagttatcaaggaaacagctgaagtaactgacgaaatcacaaatatttaattttacaaagccaagtgtgccgttcgcgtacacttggctttttttgttatactcatataaaaaggagtgaagtgatttgattacacatgttatttgggatatgggcgaaacattaaacaccgtaccaaacacaagatacgaccattaccctctcgatacttacccggaagtagtgctgcgcaaagacgccaaagaaacgcttgaaaaagtaaaacaactcggattcaaacaagccattctaagcaacaccgcaactagcgataccgaagtaataaaacgcgttctaactaatttcggcatcatcgattattttgacttcatttacgcctccaattccgaactccaaccaggaaaaatggaaaagccagacaaaactatttttgatttcacactaaacgaacttcaaattgataaaacagaagcagtaatggtcggaaatacatttgaaagtgatattattggcgcaaatcgtgcgggtatccatgcgatttggctgcaaaatccagaagtctgccttcaagatgagcgccagccccttgtcgcaccgccatttgttatcccagtttgggacttagccgatgttcccgaagcccttttattattaaagaaaatttcttcttgacctgtaatgcattacacaaagtaaactaaaaaagtagaagaaattagccggaaggggcgaacgaaatgactgaagtgaaaaaacaatttccaaaaggatttttatggggtggagcaactgctgcgaaccaagttgaaggcgcttacgatgtagatgggaaaggcctttccacagcagatatggtcaaatttattccgaaagaagaacgcacgaaagaccttgaactagatgtttctaaagcagaaatcgaagcaattatcgcagggaaagtagaaggcagattccctaaacgtgatggcgttgatttttatcaccactataaagaagacatcgcattatttgccgaaatgggctttaaaacattccgactatcactaaactgggcgcgtattttcccgaatggtgatgacaaagagccgaatgaaaaaggccttgaattttatgacaaagtgtttgatgaattattaaaatatgacattgagccacttgtgacactttctcactatgaaacgccactaaatcttactttaaaatataacggttgggctgatcgtcgcgttatcggatttttcacgaactacgcggaaacagttttcaaacgttataaaaacaaagtaaaatattggttaacttttaacgaaatcaatgttatttcacttagcgcatacactggtgggggcgtgcttttagaagacgcgaagaatccacttgaactttcttatcaagcaggacatcaccaattcgtagccagtgctcttgcaacaaaattggcgcatgaaattattcctggatcacaagttggttgtatgttagcgcgtatggcgacttatccagcgactaacaatccagatgatatcctaaaagcacaatacgaaaatcaacaaaatctatttttcacagacgttcatgctcgcggtgaatatccaagcttcatgaatcgtttcttccaagagaacgacattcacatcgtaaaagaagttggcgacgacgaaatcttgaaagcacatacagttgatttcatttcattcagctattacatgtccctgtccgcaacagctagcccagaaggcgaccgctctgccgggaacttaatgggtggcgtgaaaaatgaatacttggagtcgtccgattggggttggcaaattgaccctaaaggcttgcgctggacactaaatgatctttatagccgctacgaattaccacttttcatcgtggaaaatggcttaggtgcttatgatacagtagaagaagatggcaaaatccatgacgattaccgcattgactacctgcgcaaacatatcgaacaaatgaaagaagcaattgctgacggcgtagatttaatgggttacacaagctggggtccaatcgacctagtaagtgcctccacaagcgaaatgtccaaacgttacggcttcatctacgtagaccaagatgactggggcaaaggaacattagaacgctcccgcaaagattcattcttctggtataaaaaagtaattgaaacaaatggtgaagatttagattaataggtagagtacagccccgctttggcggggctgtttttttacgctacttcccacaagaaaccaattctgcaatcgctgaacgaaaaagttcaattaattgtcacatctttcgtgtagaagggtctaatgcgagaaaaaatggcgggcatcttctgttataattattcatcaaagactagtaatattttacgccaagtcatccaagatagtgcagatccaaggtgtatttaatgatgaattatctactcagtcaaattataaggagacgataaaatgaaacagagaaaaacctcagtactacatgttttacttgtagtgacagctatcttgggaattagtttatgggtaaatgcaagtcatgggatgaaagctcaggcagagagtattgcgcaaccagcgccaattaacgaaattttcacggatccagcattagcggacgaggtgaagacggaacttggaaaaactagtgtcactgatgaagttacgcaaacagatttgaatcagataactaaacttgaagcagacgacaaaggaataaattcaatagagggaatacaatatttaactaatttgaatatgttgggtgtatcttccaatcagattactaatattacacctcttgccaatcttactaatttagattctttatatttaggagataataaaattagtgatgtgacgccactttcaggattgacacagttaacattcgtacaattatctatcaatcaaataaaagatgtgacacctcttgctaatctaacgaaattaaattatttagatttacgagaaaatcaaataagtgatgcaagtcctttagttaatatgactgatttaacggttttacatttagaaaaacaacaaataacagccgcgccagtcgtatatcaaactaatttagttgcaccagatattttgaaaaatgcttatggtgaagtagtaccaccaacaacgattagtaataacggaacctttgctagtccaaatatcacttggaacttagatagtttcacgagtgaggttagttatgattttaatcaaaaaatcacactaggtgataatgggaaggtaacttttgcaggaactgttgttcaaccgatagtagaagcgcccgtgaattacattactacatttgatgtggatggaacgacgacgacagaaaacgtggtagtggatacattaataaccgaacctgctgaaccgacaaaagaaggttatactttttctggttggtatgatgcggaaactggtgggaatgaatgggattttgcagtagataaaatgccggctacgaatatgacactttacgcacagttcacgataaacagctacacagcgacatttgatgtggatggtgaaacaactaatcaaaaagtagattaccaagctctgctacaagaaccgactgctccgacgaaagatggctacacatttgtaggatggtatgatgcaaaaacgggtggaactgaatgggatttcgcaactagcaaaatgccaactagtgatataactttatatgctagatttactaaaaatcctagctcagacaattctcaaacagctcccggaaaagatgataaaaacgacaaagataaactaacaattaaagctaacgacagcgcagatgcgacgagtactaaacttccaaaaacaagtgatgattcaagtatgattcctactattttaggaacgcttttcatcggaggtgcaatactaatcttacgaaaaaaaactactaacatttaagataaagtagatttggtttctattttcagtagagaccaaatttttttgttaatttggtctaaaaaagggtatctattattaatgacttatttagaagaataattagtgaatctaatttaaataaaaggagagggattatgaaaaaacggtggaattcagtattcaaactagttttaatggtaactgctattctcgggcttagcctatatgtaacgacaagccaaggtgtggaggttcgggcagagagcatcacgcagccaaccgcaattaatgtgattttccctgatccagctcttgcgaatgcaattaaaatagcggctggaaaatctaatgtaacagatactgtcacgcaagcggatttagatggaataactactttatcagcatttgggactggagtaacaacgatagaaggagtgcagtacttaaataatttgatagggttagaacttaaagataaccaaataactgatttaactcctcttaaaaatttaacgaaaataacagaacttgaattatctggaaacccgttaaaaaatgtgagcgcgattgctgggttacaaagcataaaaacgctagacctaacttctacgcaaattacagatgtgaccccacttgcaggtctttccaatttgcaggtattatatttggatctcaatcaaataaccaatataagcccgcttgcaggactaactaatttacaatacttatcaatcggaaatgcccaagtaagtgatttaaccccacttgctaatttatctaaactaactactttaaaagctgatgataataaaataagtgatatttcgccacttgctagtttacctaatcttatagaagttcatttgaaaaataatcaaattagtgatgttagcccacttgcgaatacttcaaacttatttattgtcactttaacgaatcaaacaattaccaaccaacctgtgttttatcaaaataatcttgtcgtccctaatgtagtaaaaggtccttctggcgcgcctattgcacccgctactattagtgacaatggaacatacgcaagcccaaatttaacatggaatttaactagttttattaataatgttagttatacttttaaccaatcagtcactttcaaaaatacaacagttccgtttagtgggacagttacacaaccattaacagaagcttacactgcggtttttgacgtggacgggaagcaaacaagtgtgacagtcggcgcgaatgaattaattaaagaaccaacggccccgacgaaagaaggttacactttcacaggctggtatgatgcgaaaactggcggaactaaatgggattttgcgacagataaaatgccagcagaggacatcacattatacgcgcagtttacgattaatagttacacagccacatttgatattgatggtaaattaacgactcaaaaagtcacttatcaaagcttgctagaagaaccagtagcgccaacgaaggatggctatacgttcacaggttggtatgatgctaaaacgggtggaactaaatgggattttgcgacagggaaaatgccagcgggaaatataacactatacgcccagttcactaaaaatgacaacccgaatcccgatgatccaactaccaataccccaacaggaaatggtgatggtacaagtaacccaagtaattcaggaggcaataccacacttccaacagctggtgacgaaaataccatgcttccgatttttatcggggttttcttgctaggaacagcgacgctaattctccgcaaaacaatcaaagtaaaataacaacaaaaaaagctgaggtctatagtttttctataggcttcagcttttttattagtagataaattcatctaaacgtcacaactaaatcgttaacaagtctaattttagtgattaaacgaaatcctactacgctataatatagtgacttaactacgagaacatacaaatttctaaaaagcagaattactttataaaggagatagtttaatgaaaagaaacaaaacagcattaagaatcttagtcactttagctgtagtattggcaattactttttgggtagggatgagctcaaaagaagtacaagcagcggtgattgaacacccaacccctattaacgaaatttttactgatccagtgcttactgataatgtaaaaacactgctcggaaaagcggatgtaacagacgaagttacgcaaaccgacttagatagtgtaactcatttatcagcaaaatcagcaggaataacaacaatagaaggattgcagtatctaactaatttatcggaattagaattaatagataatcaagtaaccgatttaaatcctcttactaatttaacgaaaataacagaacttagattatctggaaatccgttaaaagatgtgagcgcgcttgctggattaaaaaatctaaaaacgatggatcttatttatacagatattacggatgtgacaccacttgcaggactttccaatttacaggtgttaaatttagatatcaatcaaataactgatataactccacttgcaggactatctaatttacaatttttatcgttcggaagtactcaagtaagtgatttgacgccacttgctaatttatctaaactaaccacactaaacgctatgaatagtaaagtaagcgatgtttctccacttactggtttatctaatctcacagaagtttatttggaagagaatcaaattagtgatgtgagtccgcttgcaaaattacccaacttatctattgttactttaacgaatcaaacaatcaccaaccaacccgtattttatcaaaataaacctatcgttcctaatgtagtaactggcctttctggtgagcttattgcaccggatactattagcgacaatggaacatacactagtcccaatttaacgtgggatttaaacagcttcattaatagtgttagttacacatttaaccaatcagtcactttcaaaaatacaacggctccttttagtggaacagttacacaaccattaacagaagtttacgctgtagtttttgatgtggacggagagcaaacaagtgcgatggtaggtgtgaatgaattaattaacgaaccaactgctccagccaaggaaggttatatattcgatggatggtatgacgcaaaaacagacgggaataaatgggactttgggatagataaaatgcctgctagtgatataactttatatgctaagttcactgagaacgaagaaccaaatgctagtagtccaattaatgtggaaccaaatgacaataattcagacaatgcagaaccaaatgctagtagttcaaataatgtacaagaaaatggaactaacgaaggaataaataatctgaacagttcaggtgaagataaagtcaacatcaagttaccgattactggagataaattgaatgtgcttcctatttttgtaggagcagttcttatcggaattggcttagttttattccgcaaaaaacgtcaaacaaaataaaccaatcaatggcttggcttctgtaaatcatgcagagactaagccattttttatttggtaattataagaaggagtttgcctttatagagaacgggaaaacatagagtggaattcatagaaagagggcgtgaaatatggaccaacaaaaaaagattcaaattttaaaggacttggtaaatattgattcgactaatgggcatgaagaacaagttgcgaactatttgcaaaagttgttagctgaacatggtattgagtccgaaaaggtacaatacgacctagacagagctagcctagtaagcgaaattggttccagtaacgagaaggttttggcattttcagggcatatggatgtagttgatgcgggtgatgtatctaagtggaagttcccaccttttgaagcgacagagcatgaagggaaactatacggacgcggcgcaacggatatgaagtcaggtctagcggcgatggttattgcaatgattgaacttcatgaagaaaaacaaaaactaaacggcaagatcagattattagcaacagttggggaagaaatcggtgaacttggagcagaacaactaacacaaaaaggttacgcagatgatttagatggtttaatcatcggcgaaccgagtggacacagaatcgtttatgcgcataaaggttccattaattataccgttaaatccactggtaaaaatgcccatagttcgatgccggaatttggtgtgaatgcgattgataacttgctgctattttataatgaagtagaaaaattcgtgaaatcaattgatgctactaacgaaatattaggcgattttattcataatgtcaccgtaattgatggtggaaatcaagtcaatagtatccctgaaaaagcacaactgcaagggaatattcgctcgattccagaaatggataatgaaacagtgaaacaagtgctagtgaagattatcaataagttaaacaaacaggaaaatgtgaatctggaattaatatttgattatgataaacaaccagtatttagtgataaaaattcggatttagtccacattgctaagagcgtagcaagcgacattgtcaaagaagaaatcccattactcggtatttccggaacaaccgatgcagcagaatttaccaaagctaagaaagagttcccagtgattatttttggaccaggaaacgaaacccctcaccaagtaaacgaaaatgtttctataggaaattatttggagatggtagatgtttacaaacggattgccaccgagtttttatcttgatgaaactttaactttacttatttcccgatataaaataagtaattaaatagaagtctagtatttgtttgtaaacaggtgctaggcttttttcttgcttttaatacagtttagtactaaactaataatatcaagaggagggaacgaacatggtaaaaaaagaagaaaggctaggggttttgctttggtttcgatttagtcgtttttataatcgaaatatgaagctgaccaatcagaatttgcgagcagcagggatttcaacggcgcagtttgattgcattgcccaaattggcttagacaaagagattacacagcaacaacttgccgaaaaattagtcgtaacaaagggaaatgtcacccaactcctcgcaaaattagagcaattaggttatattacgcgaacaaaaacaggacgcgagaagcatattaccctcacagaaaaaggtcaagcatgttaccgagaaaatgtcccaaaacaagaagcttttcagcaagctcaatttgataaattaacaagagacgaacaaaaagaactacttaagctattaaaaaaattaggagagtgattatttatgaaattaacgggaattcatcacgtatctatttttacagcgaatgcacgagctaactttgacttttatacaaaaataatgggactacgactagtgaaaaaatcggttaaccaagacgatccttatacgtaccacctatactatggtgatgaaattggctcgccggggacagcgctaactttctttgaagttccgaatatggctaaaaaccacccatcacgcaatgcgatttccggactcagcttacgtgtgccaagcgatgaagccttgcactactgggataaaagactcgatgaacatcgcatttttcacagcaaaccaattgaccaattcgggcgcaaaattattcgtttaaaagacacagatggcttgcctgtcaatttgatttctgatgaaacaagcacacaagtaaccgaggtgaccccttgggaagatagcctggttccagcagaatacgcgattcgcggacttggtccagtgcgcttttccgttttcaaaaaagaaaaaacagaccgccttttgacgaaaatattaggcttcgaacggattggcgcctatgaagatgatgataaattagttacagtattcaaaactggcaacgttgggcttggcggcgaagtgcacgtggagtcgcgacctgatttagaacaaggaaatctaggcgctggcggaattcatcatgtggcgtttcgtgtaccgacagatggcgacttaattggctggacagaaatgatacaagaccttggctacaaaaattcaggttatgtggatcggttttatttccattctctttacttccgtgaaagtaatggtattttaatcgaactcgcaaccgacgaaccaggtttccaaacagatttcacgaaagagcatggaacctatgtagatttaccgccacacttagaagaacgtcgcgaagatattttggcacatttaaaaccgctggatacagacaaataaacaagaaaaccttgaaaatatgcccattcatgatacaattttagaagaatgtgtaattaggaggcagaattttggcagaaggtttacgtacaatttattttgtaagacatggtaagacagagtggaatatgactggacaaatgcagggatggggcgattcgccgctagttgcagaaggtattgacggggcaaaagcagtcggcgaagtattaaaagacatgcagattgatgccgtttatacgagtactagtaaacgcacgcaagataccgcggcttatattctcggtgaccgcgaaatcgaaattcaacctctggaagaactaaaagaaatgggttttggaacatgggaaggcattagagtaacggaaattgacgaaaaacacccagaagaacgcgcaaagattctccatagtccagaaacctacaaagcagaagtaaatggtggcgaaacctattatgagcttgcagaacgactactagaaggcgtcgaaaaaattattgcagacaatccaaatggtaatattctcgtcgtttctcacggcatgtcgctcacgttattattatacttgctgcaaggcggaactattgaagatcaccgcaaagaagcaccaagaattttgaacacaagtattagcatcgtagaataccaaaacggcgaattttctcttaaaaaaatcaatgaaatcggtcatttagacttaaaataagtagaatctcgggcatatctcattggaggtgtgtcctagatttatacataagagagagctagaaaaagggagaaaacatacatatgaaaagaattgtcaaaatttttctacattatttattaggaattttaggaattattttaatcagttgtgttcccgctatatttagcaaagtaacatcgtggtcatcaagcacgtactgggaggctcttaagtcaatttttacagcgattttccacccaaccaaatgggaaattagttaccaagggagcgcagaagtttttcatgtgtcgttggcagattttatcaccggaccatatttctactccatgaaaattatcgtagcgagcttggtaatttcagcgctcattgcctatttgctagtaattgcgacatttcgcgggccaaaatggttgcgccgaggcttaagcggattcctatcgatacttcaagcgtttccagatttttcctttattttccttattcaaatggccgtcgtctacatatatcaacaaaccggcgtgttcaccttgaacttctacagcttaaatggcgagcaaatttatgcagcaccaatcgtctgcttgtccatcataccaaccgtgctcttttacaaaatgatgatgctccttatggaaaatgaatggcaggctgactacatccaattggctcgcgggaaaggcttaaacgataaagcgatactacttcgccatgccacacccaatatgatgcaaagcctattttaccaatcaaaaaccatcgtttggtttattttaagcgcctacctcgttgtagaatttttatttgggatcgaaggcgtgctctactacttactagcgggatttagcccattaaatattttcctagtattagcactcgtgttcaccccattttacttcttttacacactaatagacctttggattagctgcggaaaaaataccgagagcgcaaatgtgacccgaataccgctgcactggaatagtttccaaaaaacctttaaggaaaaagtaaatcttaaaagcaaatggcgcaactttgtagtaacgaccggacagctcctaaaacgaccatctttcagcattccgctggtcacacttagcatcttactaatcgcaagccttatttacgggcttatgggagacaaaatcaactcgcttaaatttatcagtgatgcgaccggacgagtaaccgatatggcgcccttcaaaccaaacgcgcaagtatggctaggcaccgaccaagccggcaactccattctcgaccaattactcgtcggcatcaaatacacgctacttatagctgtcatcatcgcaacgctacgtgtcgtgattggttacattttggcagtacctctcgcatttttcagcaaaccgcgcacacgcaatttcgtccaagcgacagcggacgggatgcattatctaccactgtcattactcgtctttattatcatggtcaacgaattcatcagctattctggcgttttcgaaaccagcctatttacacgcataacctttcaaattttaatcatggttgttatcgttttaccaattacaaccaaccgaatcagcagcgaaatttcccaagtattgaaaaaagaattcgtcctgagcgcgctcgtgtttggcggaaatgctcgctggattttaaccaaacatatcaacccacaaatctggtcgaaattaattttgatttggattgaacagctcattcaaaccttgcagatgttcgtgcatttagctatctttggaattttcatcggtggggcgattatgggcgccgatgacggcatgctgaaccccgccatccccgaattatctggtcttatcgcaaatgctaaatttgttttcgccaaccaccaattctggataattttaccgccattagttgtatttatgattctaattctttgtttccaaatgatggcaaattcgcttttaaaacgagaagaagacagcaaaaaagcctagttcttttaaagaactaggctttttcaaattcctctatagatttatctaaccataactcataccattcaagaaagcctaaacgttcttcattcccaaagtaaaaatcaggatagacaccattgtcattatttctgtcatccacccaaatttctccgtaagaagggccgtttacaactaggttaatggacacgccgcaaccaaagttagcaatgcgcagaagtccaaatacttctttatcagaaaagcaaagttcttgccaagcatcataagcttcatcggacattccttctttataacccggcccattccagtcatctgtatgtggaaaaggcttgctcagcgtttgcacaccatacttttcagccttgtaatcaagagaagaacaaagtccgtccactagagtttctaaaccatagtaaggacccattccaccatcaccaatctgttccaaaaatgcgcgataaccttgtggtaaagcaatttgatgctcattttcaaacgcagcaatagtttgattagacaaaggctgattgagtttataggcatggctttctgaaccaaataaattcaaatcaacatctttttcttttaaagtagtgatttttgcttggattctagctagttgactttgatattcagccatattttataagtctgctccattagtctcaatcacttgtttataccaataataacttttcttcggaatacgcgtcattggcgcatcatcttctacatcacgatcaacataaacgaaaccgtaacgtttttggtagccgtttaaccagcttagaaggtctgtgaagctccaagtacaatagcctaacatatcaaccccgtcactgattgcatcgcggatagcagttgcgtgcgcgctcaggtagtcaatacggtagtcatcgtttacttcgccatctactaatttatcaaattcgcctaaaccattttccgtaattaaaattggtaaagcatagcggctgttaatacgacgaagcgcaatttgtaagcctttaggatcgattgtccagtcccagttcgttgtttttacaaaaggattaacgacttttttgtaaacaccagggacaccagtttcttttgtgctgccttttttaccagtgaagttcatttcgttgttttgaccaacgccatcaagcgggttgtaagcaacagttgcggattgatagtagttcacgcccatgaaatctggttttgcagacgcaagtagttccatatcgccatcttcaataactggcgcaatatcgttttcttctaaatatttccaaacagctttcggataacgaccaaaagcatacatatccatccagaaataactatttaattcttctgcatcatccgcagcttgaacgtttttaggatctgtgtcgattggataatgtggtgtgtaagcaaaacttggtccaatttttccatcaggaacgatttcgtggaaagctttgataacactagcattagctaagttcgcaatgtggttgactgcgtacattctttttggatcgctaacttttggtgggtgaagcgcttgaccataacccataccaacaaagatattttgctcgttcaaggacacccaatatttaacgcggtcgccgtaacgtttgaaaagtgttgtggaataatttgtgaaatcttcaataacttggcgagattcccaaccaccgtattcatcaaataatgcttgcggaatatcccagtgataaagcgttacaagcggttcgatatcatatttaagcaactcatcaattaagttatcataaaattgtaacccagcttcatttacttcgcctttaccatttgggaaaatacgagtccaagcaatggagaaacggtaagcttttaagccagcgtcagccattagttttacgtcttctttataacggtgataatggtcaacagctacatcgccatttgtacctttgaaagtagttccaggaatgcggacatattcgtcccaaactgatttacctttgccgtctgcgtcccatgcgccttcgatttgataagctgcggatgcagaaccccataagaaatctttcgggaatggtgaacgtttttgatgttccattaatataacctccattaaagcgatttttattaaaaaactctactaatatattttaaagtatattcttttaaaaagatagttaaaaaacgcagattcgaataggaatctgcgtttttgttttatttatccagtacaaatttttgaattgcttttgctacaccactatcattgttcgatgcagtcgtatagtcagctaattgcttaattctttccggagcattgcccatcgcaataccaagtccagcaaattcaagcatcgtaacgtcattttcttggtcgccaatgcagataacttcgctttgcttaatgccaagtttttcggaaagttctttgaccgcgttacctttactagcgtcacgatttagaatttccaaatagaaaggcgtgctacgaactaaatgatatttttcgcggaatgattccggaattttcgcaataccaacttctagctcaggggcttcttcaataaacattgctttcgacataataaaatcttccggcacgttttcgatttctttataaatcagttggctaccagtaagatatgcttcgacaatcgtatatttgccgatttcacggttcggtgtataaagcgctttatcatcaaagaaatgcatgtgcaaattgctatttaagctcacttcgtaaatatcttttaagtcttcgataccaagtgttaagtgagaaataacttcttttgtaaatgtatcttgaacaaatgcgccgttaaaactaataacgtaatcgccttcctcacgtagttcaagttcagttaaataattttctacaccaacaagcggacgtccagtacaaagaaccacttttacaccttttagtttagcttggcgaatggcttcttttacttcatcagtaaccttatgatcatctgtcagtagtgttccatcaatatcaatcgcaattaatttatacaatatactagctccttttccatcataaactcattctagtatagcataaactaagacagatttgcggctaactattgaaacaacaaggaatttatggcatgattgacttggaaacttgataaagaaaagagtgaaataatgaaacgtaattatcatgtgaaatttttaaatgaaaaagatgttgaacttgcagaagctgtttgcgcggcatccgaggattattatttaatcgaacaagataagtctgcatcgaaaagtgatgcattaaaaattatcacagaaattccagacgggaaaacacgattcgataaattcgtgctagcagtgctggatgaaaatgaaaaaccaatcggcttagtagatattgtttctgactatccgagaaaagggcgctggtttatcggtttacttcttttaacgccagatgctcgtcataacggccttggaaaagtacttcatcaaacaatcaaagagtgggcaagtgacggcggggcagattctttagcgttaggtgttttagctgagaatgaaaaaggtcgtggattttttgaacatcttggctacacgaaagaagaaaccaaacaagctagctatggcggtaaagaacaagaagttagtattttcactttagcgattaaataaaaaaaggatgcagctcataagactgcatcctttttcttagtttatgctattgtttttttctgaaagagcttccatgttaatacgccattgcagttttacttttgaaataatcccggcctcttttaattctttaagttgagaatagaagaaggctttcgacagagtacagtagtttttaatgaccgtcgtactaatggatttaggtagtactgcgacgccgtcttccactgggatatcaaggattttgacaagcatttcaaatacaaaagccaattgatcttttttatcgcgatattgtaaaagtgatttgtagtaaccatgtttggcgatagttctcataattgtgtattggaagctaaagttttcagggaagagagagagcgagtattcgatatctttcttcttgtagataattaattcgcactcagttagtgtttgatacgttaaaacaagggatgaattatcgaaaatcgtataatatcccatgaaaaaattagatgtgaaaatagaataaattttatcattgtcgaaatcaatatatccggctaatataccagatttaagtaaatacacacaatcccgattttcagtaactaaatcatttagaatggtatgttcgggtattgtgatgctgttagattttaaattgtattgttccatcattgcaacaaactctttgtgattaaatggataggccattttttacttcgtctccttcagattcagttgtactaatacaaatacattgtatcatcgtaaaagtttatctaagtactaaaaatagactacgaaagaatctcttttttatgaaaatacccttttttagccaatgtaaccgcaatatttttgccatatttgagttatttctaactcaaaaaggttaaccaatacgcatatttagaaaaagccaataataaagatgagactttattattggctttttcgtataatcataaattattttccgatagaataagaggagccgttgcctgttacaacgacggttttattacgatctgttcgataaactttcgcctttgcttttttcaatgtgttaacggtttgtgaagtggggtgcccatatccatttttaccaacgctaataatggcgtattttggtttaacaacattgacgaatgctttgcttgttgcagctttggaaccttgcgtacttacttttagcacgtcagctcgtaaggttttctttgccttaatcatatcgttttctgcttttgtttgcgcatctcctgtgaaaaggaaggtgtttttcttatatgcgacgtggagaacagcactccagttgtttcgatctgtttttccgtaagttttaacaggaccaacaaactgcgcatttactcctttgacagggagttttacgcctgcttttgcggttttaatggttagtttcttctttttcgccgtattcacaaaatttttgtaagcggccgttgtgtttgtggattttggtgcataaaggttttttaccttgatattattcatgacttctggtaatccaccaatgttatccgcgtctgaatgagaagcaatcattatctcaatatcttttacttttaatttttttaaataatttacaacagttttccctttacctttgttacctgcatcaattaaaatatcttctccactaggtgctttgatataaatggcgtctccttgaccaacatcaataaaatgcacttttatagttggtgcagcagcttcaacttgcatagaacttggtacggaaagccccgcaattaaagcaaaaactaataatacgtttaaaatcccttttttcatcccttttcctcttctcttatgaaatgaattcttttagaaatttgtaaaccccatctgcttcattcgtgtcagtaagatgatttgctgctgctttgacattatcgcttgcatttgccatcgcaacaccagttccagcatattgtagcatgccgatatcattttcgccatcaccaaaagtaataattctttcgcgtggaatattgtaatgctttccaagcgcttcaacggctgtttttttatcagaattagctggaagtatttctaaattattatggtgtgaagaaaggactctaataccattcgcttcatttagcgcagcgcgaacttcggttagttttgaggcatcctcttccgcaactacaatagcatttaaaaattgatgcatgttttcatcaaaaatacctttttcattaatagaaacgagcgaaaaactattgtgtcctgtatctaagcgacttttatcagcaagattttggaagaaagcaggtggttcttttgtatagaaaagtgtattggtagagaagaaaaaaagtggtaaatcgaagtcgctcataatatcgtaagtggagcgaattgctttctcttctaaagtagttttaagcagttgttcatcgcgaatagccgcgtaggatccgtttgaggcaataacatgaccggaactacttacttggaagccaacttcacgagcagagcgatacatccgtcctgtagaaatagaaaaaatatggccatctttttctaaggtttggattaaatcacgcgtttttttagagacagtttgatcttggcgcagtagtgtgccatcaatatcggaacaaatcaaatactttttagtcaaataaaatcatcctttttagttaataacttaagtataccatgtgcgaatcggaatagttatatatgatacaatagtttttatcgagttctaaaataattttttggaggagttccatgatgggaaatttaaactgggcaattcttggaccaggttcgattgcacacgaatttgcagaaggtatgcgaggaatgaaccgtgaaatttatgcggtaggagcacggagtttagagaaggggcaagcattcgcaagtcaatacggaatagaaaatgtatacgatgactttgacaaaatgcttgctgatccggcgatagatgtagtttatatcgctacaccacactccaaccactatgaatttatcatgaaaagtttacataatggcaaacacgttttagctgaaaaagcgataactgtaagcagcaaagaacttaatgaaatcaatgtgctagccaaagagaaaggcttaatcgttaaagaagcaatgaccatattccatatgccgctttataaaaagttacgagaaattgtggaatctggagcaattggtaaattgaaaattattcaagttgcttttggaagtgccaaagaaaaagatccgaaaaaccgtttttataatatggatttggcgggtggagcattacttgatattggtacgtatgcccttagttttgctcggtattttttaagtgaaacgccagatgaagtattaacgacgatgaagaaattcgaaacaggtgtggacgaacagtcaggaattttactcaaaaataacgaagaggaactagctgttgtatcgctatctttccgtgctaaaatgccaaaacgaggcgtcattgcttgtgaagaaggatttatcactgtagatgaatacccgcgtgccagccgagcaactgttacacacacggcaactggaaaagtagaagaaattgaggttggcgaaacaagtaaagctttagaatatgaaattacagccatggaagagagcgtcgcgacaggagaaaacatgacttatcagttaacaaatgatgttatcgcgattatgagcgatgttagaacgcagtggggaattaaatttccttttgaaaaataagaaaaacccgccgagcttggcgggtttttctacaaatattaatcagttaaattatcttctgtttctgggtcgaagaaatgagatttagacatttcgaatgctaaagtcagtacttcgtttggttggtgttccgagcgagcatcaacacgtgctacgaattcatgtgtaccaacacggctgtgaagcataaattcagcaccagtaagctcggcaacaatagtagtcgctttgaaagtataaccaggattagcttcgataacgattggctcatcatgaatatcttctggacgaataccgaaaacgatatttttaccgtcgaagcctctgtctttaagaagttttaatttgccttctggaacttcaatagtgaagtcatcgccgataaagttagaaccttctaaacgacctttgaagaagttcattgcagggcttccaataaagcctgctacgaacatatttactgggtgatcgtaaacttgttttggtgaaccaacttgttggataacaccgtctttcatgataacgatacgagttgccattgtcattgcttctgtttggtcatgggtaacgtaaatcattgtagtatctaattgttggtgaagttttgtgatttctgcacgcatttgcacacgtaatttcgcatccaagttggaaagtggttcatccattaggaagactttagcgtcacgaacgattgcacgacctaaagcaacacgttgacgttgaccaccggaaagtgcacttggtttacgttttaagtattcagttaagccaaggatatttgctgcatgctccacacgttttttaatttcgtctttaggcattttacgcagttttaaaccgaatgccatattatcatatacagtcatatgtggatataatgcgtagttttggaataccattgcgatgtcacggtcttttggcgcaacattgttcattactttaccatcaatagatagttcgccttttgaaatttcttctagtccagcaatcatacgcaaagttgtagatttaccacaaccagatggtcctacaaaaacgatgaattctttgtcatcgatttctaaattaaagtcagaaactgcagttactttgttatcataaattttataaatatgttctagtgataattgtgccaactttcttcgcctctttctattttttaacttgtgttcattgtatatgaaaacgctttacaaaaactatggcaatttgcacaaagaaaaaaatcatctgttgggcaacttgcataagtagcaaaaaagtaaaaagaagtaaagggacaaaagaccttttatgtgaaagatttttcaaagcgcttaattctttagtcccaaatccgaaaattcctcagatatcattacaaaaaaacttcatcttgtgttatattattaaggcagacacaatatatagttagtgggggattatcatgtacgtggaacaacttaatgaacaaatggtaataaaaagggacggccgtaaagcaagctttgatttaattaaaattcgtaatgccgttgaagcatctatgaaagcaattaatttagaggatgaaactttcttagaagagattttgcttgaggttgtaagtgaattacctaacaaggcagatatgaccatcgatgaaatccagcattgcgtcgaaaataccttaatgaaatcgacgtatcctgatgtagcgagggcttacatagagtaccgccatgaccgcgaccatgagcgtgaaaacatcacagatatgcacaaaagcgtagaaaagctactacaaaaagacaaaacagtagtaaacgaaaatgccaacaaagacgcgactgtctttaatacgcaacgcgatttgacagcaggagccgtggccaaaagttacgcattaaaatacatgctaccaaaacacgtatctaacgctcatttaaaaggggaaattcactttcacgatttagactacagcccataccatgcaatgaccaactgttgtttaatcgacatcgaaggaatgttatcaaaaggatttacgattggtaatgccaacgtagaaagcccgaaatctatccaaacagctacagcacaaattgctcaaataattgcaaacgtagctagttcgcagtacggcggctgttcggttgaccgcattgatgaagttttatccgtttacgcgcgtttgaactttgaaaaacacaaaaaagacgcgatggaatgggtcgttccagaaaaacaagaaggttatgcagcggagaaaacacgcaaagatatttacgatgcgatgcaaagcttagaatacgaaatcaacacattatatacaagtaacggccaaacaccgttcgtaacactaggatttggtcttggtgaagattggtttgcccgtgaaattcaaaaagccatcctaaaagtgcgtattggtggggttggtaaagataaacacacggctattttcccgaaattagtattttcgattcgccgtggaactaatttaaatgcagaagatcctaattatgacattaaacaattggcgctagagtgttcctcgaaacggatgtatccagatgtactcaactacgattcactcgttcgcttaacaggcgatttcaaagtaccaatgggctgtcgttcattcttaccagcttgggaaaacgaaaacggcgaacacgtgaacgcgggaagaaacaaccttggagttgtaacgcttaatattccacgtatcgctatccaaagtggtggggacaaagagcgattctgggaaattttccacgaacgtatgaaaacagttaaagatgcgctacttttccgtttaaaccgtgttcgtcaagcacgtccagaaaatgcaccaattttatataaatatggagcatttggcaaacgactacaagacggggaagatgtagatcaactttttaataaagaacgctctactatttctatcggctatatcggtctttacgaagctgcaactgtattttacggcggtgaatgggaaggcgacaaagaagcaaaaaacttcacgcttgatattgtgaaggaattaaaagcctatgcggacaactggaaagatgaatatggttattggttcagcgtatattcaacgccaagtgaaagcttaacagaccgttttaaccgtttagacaaagaaaaatatggtgtaattaaagacatcacggataaagactactaccaaaactctttccactatgatgttcgtaaaaaaattgattttgaaaaagattatccagaattttgctctggcggattcattcattattgtgagtatccaaaaatggttcacaatacgaaagcacttgaggctgtatgggattactcttatgatcgcgtagcttatcttggtacaaatacaccaatcgataaatgttacgaatgtgattttgaaggtgaatttgttcctacagaagaaggctttaaatgcccaagctgtggaaataccgaccctgaaaaagcagatgttgtaaaacgtacgtgtggctatttaggtaacccaatgaaacgcccaatggttcatggacgtcacgtagaaattagtaatcgtgtgaaacatatggagaacttaggtgaataatccaaaaccgtgtgaatggaagtcgaatgaattatccagagggtatatcgctgactataaagcattcaattttgtcgacggggagggcgttcggtgcagtttatatgtatctggatgccctttccactgcgaaggctgctacaacaaagccgcgcaatcatttaaatacggcaaaccttacacaaaagaactagaagacgatatcctaaaagacatcggccatgaaagcgtccaaggcctaacgttacttggcggagaaccatttctaaacaccgccacatgcctatctatcgtaaaacgaatccgtgcgacatacggcgaaacaaaagatatctggtcatggacaggctacacttgggacgaaatgatgcaagaaaccgccgacaaactagaacttctatccttaatagatgtcctagtagacggccgcttcgaacaaaaactattcgaccccaacctagcattccgcggttccagcaaccaaagaattattgatgtgcagaaatcacttgctgcgggtgaagtggttttgtatgagttgtgaagaaagtcctctgtggtagagggctttttttatgctttctgctattgggtgcgtattgaatatatgcagtcttctctgattggggcgtgcatttcgcgtgatttctaggagcatttcctgtctttatatgtaatttatacgcatggtgtacaatgaacgacataaaaatgaagatggtattgatacgaataaaaaatatccatccgattttggtttgaaaaaataaaaaatgccacccataactcgggtgacattttttaatcatcaaattgtctaactttcacataattatataatcccttatccttaacaacccattctttcccttttttccaaatcttaccgtgctcttttaaaagggttaattgtttgtaaaaactacttttcgatagattgctataagcagcgatagtactagttcgcatttctttcggtaagataacactatctttttcatagagtgttccgtgtaatttgcccatattagaaaaagaaagctctaatttatcagaagaactagtctcggcgaaaagacttttgaagaacgcgtggcgagccaggtcgcgcataatgaaaaattgaaaaccaaaattctctggaaacatggaaagaaagtactctaaatctttaaaagaatatttgtaaatagtgcacggggaaatggctgtaaacagaaagtcatctacatttccttggaacaaactatagtaatttacaaaagagcctttacctaagactgtataaatactattagattgcggattcatagaaatagacacgaagccttcaacaattaaatagacatgattatttctttgcgaggcagtatctactaaatctgtatgttttggaacttttaatttttcatatttaatattgccttcatgagaaagccgaacaaattctttataattaaatagtgcatccattattagcagcccctttacttttttgttaactataatacataatatcaaaattaacaaaaaattaatctatattaattataccaaattgccactttattgctgataatatgtacatttaatgagaaaagatgcaaaaatattattttgcatcttttagctatttagtaaagctcaggacgtcgatcagtgaagacaggaatgattcctcgtgtttcagcaactagatttaagtcaatttccgcataaatatttccttcttcttcaccaccatgaacgacaatgttaccaagtggatcaatcacaagcgaatgtccattgaagtgattattaggatcatcgccaacacgattgacggcaacgacgaaggtttgattttcaatagcgcgcgcaataagcagttgttcccattgagtaactctttcagcaggccactgcgcagaaacaaaaatgacttctgagccttctgaagtatgtttacgaatccattctggaaatctaatatcataacaaatgaaaccagcgcaagaaacgccatccagtcgaaatagatttttatcatttccagcttctaaataaagatgttcattcataagctgaaataagtgaaccttcttatatgaagaaagtagtccgccatatttgtcgaaagcatacattgtattagaaaatttggttccttccgaaatagaaaccgagccaccgataattgcgatttggtgcttttcagaaagtgttgctaaaaattctttcgttctccccccatttaaatcagcaaccccagctaattcatttaaagcataacctgtattccacatttctggtaaaactgcgatatctgccccattttttgcagcttcaactatagctttttcaatccgtgcatagtttgcatcaggatatttaaaaactacatcagtttgacataatgccaacttccacatgttcttcgctccctttttcttttaaaaataacacaagcttggtggcgagtccatattggaacacttcgcaccaagctctaagtagtgaattaatcttttttaagacgtctagataagaaatttccgaatgattgtagtgcttgaaccataataattaaaatgatgatggttgtatacatgactgtcggctcaaaacgttggaaaccatattggtatgcaattgttccgagtccgccagcaccaactagtccagccattgcagtcgcaccgattagaccgattgtggcgatagttaagccaagaacgataccagaccgagcttcgcgaataacgacactccaaatgattttcggtgtagaaatacccattgcttgataagcttccacaactccacgatccacttccaaaagggcagactccattaaacgggcgatataaggtgccgtaaatacgacaagtggcataatcacaccttgaatcccaatagtagtcccaacaacaaaccgtgttacgggaatcattaagaataacaaaataataaacggtaacgaacgtaaaatattaataacccagtttaaaatactataggcaaccaggttttctgattgaccacctttacgcgttaatgttaaaaatacgccaagtggtaaaccaatcgcaagtgaaatcacgagtgtaatcccagtcatcgtcagcgtttctagaaatccttgccaaagtatcgggccccattcttcaaaaaacaaactcatagtaactcgacctcctcaacaacgactccagattcttttaaataagaaatagctttactgtattcaacttcgtccccttttaaatgaacaagtagttttccaagtgttccgtttttcaaatgatcaattccaccagctaaaatacttggaagaacgtcgaatttgcgtgatacaagagcgagcgcaggttcatccgcttcgtccccaataaaatgaagagaaaccaatttcccagtcgcaacatatttttcaagcaaatcttgcggaatgtcaaaactagcttccgacccaacaaaacgcttggttgtcgcgtgttttgcttttgtaaaaatatcaagaacggtaccttgttccactaaatgaccattttccattacagcaacccggtcacaaatacgttgaatgacatcaagttcatgtgtaattaagaaaatcgtaatgccgagttccgcattaattttaagtaacagttgcaaaattgcttctgttgtttcagggtccaaggcgcttgttgcttcatcgcttaagagaatttctggttcatgcgcaagagcacgagcaatcgcgacacgttgtttttgaccgccagaaagttggcttggatagttgtttcgcttatcctctaggccaacgatcgacaagtatttattcacgcgcgtttcgatttcgttttttggaacgccttctaattttaatggcttggcaatgttatcatagacagttgctgttttcagtaggttatatccttggaaaatcatgccgattttccgacgagcgacacgaagttctttgcttgatagggtagataagttcttcccatcaatcacaacttggccagcatctggacgttcaagcaagttgatgcaacgaacaagggtacttttcccggcgccactgtaaccaacgacaccgaaaatttctcctttttcgactgtaatagaaacatttttgacggcttctacggtttttccatttacattaaatgattttgaaacttgatgtaattcgatcaaaataaaacaactccctagaatgcaggtactacagacccattaaattctttttcaataaatgcttttacttcatctgaatggtaatatttttctaaagtttttacgacttcatcgtctttgttggcactacgaacaacgaaaacatttggatatggattgtcttttgtaggttcgtggtaaatggcatctttattaatagaaagtccagcgcccattgcaaagttagtattgatagctgcggctgcgacttcatctaattgtgcagggatttgagaagcttcaagttcaacgatttcaaggtcaagcgggttttcagcaatgtcttttttcgttgctttttcttccacgccatcttttaatttaataacgccagcatcttcaaatagttttaaaccacggtattcgttacttggatcgtttggaacggcaattttgtcgccttttttaaggttttttaagtctttaatatcgttggagtaaatacccattgggaaagctactgttttaaaagcaacatctaatttgtagcctttatctttcttttgttgctctaaaaatgggattgtttggtagttattcgcatccaaatcaccatcgtttaaagctgtatttggtgtattataatcatcaaatgttttgattttgatttcaagaccgtcttttttcgctaatttttgaacttcttcagcgatttgttggtgaggtcctgcagttgttccaatggtgattttttctgtgcttaaggctttatcgtcactgcctcctccacatgctgctaatcctaaaacaaggcttgatgcaagtaaaattcctaacccttttgttaattttttcatcttttttcctccctagtatgttgtgtgattatccagatttattcatgaaagcaataaaaaaacttctctattttagaatagagaagtggaaagtcgaacatatccagctcctcttatctaccaaaacggaatacaccattttgctggaattagcaccttcactttatgcttaaataaagttaggttgccgggcttcatcgggccagtccctctgccgctctcgataagagaaaatattttagaaaaacctgttagttaaaaatatacgcatattagcttaatttgtcaatgcttttttaagtttaaaaaaaatcatactggacaaatacttcagaaaactttactattttaatcaatgaaacttgaaaaggacgggtgccaaatgaaaatttccaaacgcttgcaaaatttaccagatcagtttttttctagccttgttgaaaaagttggaaaaaaggtggcagaagggcatgatgtcattaacttaggacaaggaaacccagaccagccaacacccaaacatattgtggaagcgatgaaaacagcttcagaaaaaccacttaaccacaaatattctttgtttcgtggaaaacaggagcttaaacaagccgcggctgatttttatgcgcgtgaatataatgtaacgattgatccaaacacagaagtagccattttatttgggacaaaaactggtttggtggagttgccgatgtgtttaatggacccaggtgatacgatgcttttacctgatccgggctaccctgattatttgtcaggagtagtgttaggtgaagttcaatttgaaaaaatgccactaattgctgaaaatgactttttaccagattttactaagattccagaagacatagctgaaaaaactgaattaatgtatttaaattaccctaataatccaactggcgctgtggctacggcagatttctttgaagaaacagtcgcttttgccaagaatcataatatcgttgttgcgcacgatttcgcatatggaggtattggatttgacggtaaaaagccaattagttttttagaaacaaacggtgcgaaagaagttggaattgaactttatacactttcgaaaacgtataatatggcggggtggcgcgttggttttgcagtggggaacagcgaagttatcgaagcaattaatcttattcaagatcatatgtatgtaagtctttttccaggaattcaagatgctgcaatagaagccttaacaggagatcaggcttgtgtgcgagaattaaccgcacggtatgaaaatcgtagggatgcctttatttctgcttgtagggagatcggttgggaggcagttgcgccggccggttcgttctttgcttggatgccagtccctgaagactttacaagtagcgaatttgctgattatctgctagaagaggtgagtgttgccgttgcggatggtagtggttttggggagtttggtgaaggttacgtccgcgtaggtcttttaatggatgaagagcgcttggaagaagcagtaacgcgagtttccaaattgcatttgttcgataaagttacacagcagtagccaatttatccaattttaagagaaaatcgcttgtaataattcagataattaatgggatgtgttataattggttagtaagtctattcttagcatgttgttttatgaaggcaggccagaatttaaagtatttagtgagatttttacgcattaaataaaaagtatctgtcccggttaaagccggcgaaatccaggaatgagaggactgtaaaaaaatggcagaaaagaaaattcttgtagtagatgacgaaaaaccgattgcggatatagttaagtttaatctaaataaagaaggctttgatgtatattgcgcctatgatggcgatgaagcgttagaacttgtagaagaagttcagccagatttgattttactggatattatgcttccaggtcgtgatggtattgaggtatgtcgtgaagttcgtaaaaaatatgatatgccaataattatggtaacagcgaaagactccgaaattgataaagttatcggactggaacttggtgcggatgactatgtaacgaagccattcagtaaccgtgaattaatcgctcgtgtgaaagccaacttgcgccgtcacagccaagtaagctcaagcacagccgaggaagaagaaaacagcgaactagaaatcggttctcttattattcatccagacgcatatgtggcctctaaacgtggagaaacaatcgaacttacgcatcgtgaattcgaattactacactatttagcaaaacatatgggacaagttatgacacgggaacatttactccaaactgtttggggctacgactacttcggcgatgttcgtacggtggatgttaccgttcgtcgtttacgtgaaaaaattgaagataatccaagtcacccagcatggttagtaactagacgcggagttggttattatttacgcaatcctgaacaagaataaataacaagaagtggtttccgaagtgaaaaaaattcggtgaccactttttttgggtattttcgcttacttagttactatttttataaataaatcgacccaattaacagggaaaacaatacgtctaccccataacatatggtatactaatttaaatatattaccccgaataggagtagaacgacttatgcataaaatgagattttttcagtccgtacaatttaagttagttattatgtatttgctactaattatcgttgcaatgcaagtaatcggcgcgtattttgtacgtgaactggaaggacaactggagaaaaattttcaagattctattacaaatagtattaccttgctggattataatgctagagaagaaattattaaaaatagcgataactcagtgaagttacaaaatgatattagagaactcttagtcgactattcgcgtgcaagcagcaacttaatcgaagtaagaatagtagatgacaaaggaaaaattcttggaacatcgaatttaaataaccaaggaattgttggccaaaaaagcaacgatccacttgtaaaacgaacattatcacttggaacgacttccgaggacaaaatctataaagatgaatcaaataaaaataaccgcgtttgggtgaatgtatcctccatcaaaaataaaggccaagtgataggggctatttatcttgtcgctgatattgaaagcgtatataaacaggtagatgatattaccaatattttcatcacaggtactttgattgcgatgattattacagccgtccttggaattctattatcgcgaaccattactaaaccgattgtcgaaatgaaacgtcaagcttatgcgatggctcgcgggaactatagccgcaaagttaaagtatatggtgtcgatgaaattggggaactggccgattcttttaatacgttaacgaaacgagtccaagaagcccaagcaatgactgaaggggaacgacgcaaattatcttcagtactcgcatatatgaccgatggcgtaattgcaaccgaccgccgcgggaaagtaattctcattaatacgcccgcagaaaaaatgctccgcgtgaaacatgaaagtgcgaatggacgctcgattattgatgttttagacatcggggacacgtaccagtttgaagatttaatggaagtggatggttcgttaacaatggaccgtagtactctcgacaaaccttacgtgcttcgtgccaatttctcggttattcaaagagaaactggctttaacaatggggttatcgcggtacttcacgatattactgatcaagaaaaagtcgaccaagaacgtcgggacttcgtatccaacgtttcgcatgaactaagaaccccacttaccagtatgcacagctatttagaagcattaagcgacggcgcatgggaagataaagaaatcgctccacgtttccttgaagtaacgcaaaatgagaccgagcgaatgattcgtctcgttaatgacctgctcaaactttccagaatggacggcggcagggaacaactagaaaaaagtttcgtgaactttacagacttctttaaccatattattgaccgttttgaaatgatgaaaaaagaaacaatcatgttcaaacgccatattccaagagaaccagtcatcatcgaaattgatgaagataaagtaatgcaagtgcttgataatattatttctaacgccaataaatattcaccagatggtggccgcatttcgttctatctgaaaaaatttgaagatgaaattgaagtgagcattgccgatgaaggtttaggcgtaccagacgaagatttagcaaatgtattcgaccgattcttccgcgtagacaaagcgcgctcgcgagaaatgggaggaacagggttaggactcgctattgctcgagaagttatcgaagcacatggcggtcgaatttgggccgaacgtaataagaataaaggaaccataattaaattcaccctgccatacagtgacttaccggaggatgattgggaatgatgaaaaaaacaggatttcgctcatttatactaaccattttagtcgtactcagtattgtcctaagctactttatttggaagggacaacctgattacgaagcaattaatgtaaaagaagttgaaaaaacaacaattgacaagacaatgacaacctcgcaagtattcaaaccatacaaactagctgtaaacgcaaatgaaaataattaccaaagtttagatgctgatttattaaacgaactaatggcgcaaggtaaagcctttagtttctcggaagtagtattagctagtaaaaaaagtagtgaagactatgagaaattaatccataaaaatggaactatcgagattattttccccaataatattccgttctctatctttgctcaaatttttcaagtagaaggggaagggcttgagtcagcgttctttaatcgaattgtttttgatattaacaaaacggatacagggctacattcggtttatttcacaaatgacgatcaagaaaatatttaccaaagttctttgcaaaataaagacattgataaaatcgaaaaaattgttaaaaagaatgaaagcaagctgactcaaaatgataagctaatttcaaacaaacgcaatcttttcctaagctctgaaaaaacgaaactaaatcgcaaaaaatatatcatcgattcgcttgaaattaatttattcacgtccgcactattccaagattctggtactgttaaaagtgaaggaaacacatacacagatggttcaagtgtcattgaaatggatacagataataaagtattagagtatgtaaatccatcacaagaacgtactaatccagaagacctcagcagtgttaaacgagctggacttattcaagatagttttaactttgtgaacgaccatgctggctggactggtgacggcgcttactatttcacaggttatgccgcggaaagtgcgacgactaatttcagtttattcatcgataatttacaagtgtacaatgagaatggtatggcggatatttctgtaacagaaggacttgaagctgtttataagtacatgaggccatttttccgtttagatacagatgttccgggagagaaaaaagaagttacgttaccatcatcttattctgtctatagtgctcttgcccaaaatcctaacgttaaagcagaagaaattgaagatattgttcctggttatcatatgactaggagcgaatcttcaggcatgaatcgtcttgtgacattagagccgacatggctgtataagtatcatgacaaatggttcatcttccaaccagacgcagaaaaggcgggtgaataaaaatggattggcgtaaaacacaaatgatttttattgtgactctcctcattcttaacgtctttttagcagtaatatttttcaacaagcaactatcagatgacccagatacactcggaaatgaaacgctagaagaacgattaaaagcagataatatctctcatcctgatttatcgaccaaacctactagcggctctatcttcactacagagcgagcagcttttacaacaaaagatgtgagcgatcttacagggcaagccattacgcttaaagataacaataaacaaatctattctgtcctacaaactccagtaaaagctggcaaaaaaggtagtaacccagaatttcaaaaatttatggaatcggatgtttatcgcggggaatcctatcaattttggaattatgacaaagatgctcggacgcttacttttaatcaattaattaataataatatggttctatttgatgaagcgggacaaattactttttatttagatcaagatgaccgagtgatctcatacgagcaaacttggatgtccaagcaagatgatttaaaagataaaaccaatttaatgtccgcaacagatgcattagaagcggtttatcagcacggagaattgaagcaagacagcgacgtggtttctgcaacatttggctattacacgacagtacagctgccctctggaaatgtatacttccccgtttggtgttttgaagtaaaacattcgggcgaaactaactacgtcctcgtaaatgccaaagacgaacaagtaattaatcaatcagaaaacaaatcaacaactgaacctggtgcagaattatcaagccgccaaaaagctaaataaaaaatgagtcaacctaattatcatgaaaaattaggttggctttttcaaacgatagggcatgcaattttgctgaattagcgttacaatgaaagatatatataagcctttagggggataaaaaatgttcgcaaataaaattttaactgaaaaagatacggaccaaatccgatttagtatattagccagtggaagctcagggaatgccacacttgtcgaaacaggagaccaaaaaattctaatcgattgtggtttgagtggaaagaaaatggaaggactattcgcgcaagttggtcgtgatatgaacgatttagacgcgattctaattactcacgaacattcagatcatattaaaggtcttggtgtgcttgctcgtaaatacaaactccctatttatgctaacgcgaaaacgtggaaagccatggataatatgattggtgaagtctcttcagatcaaaaattccaatttgatatggaaacagtaaaaaactttggtagtatgcaagtggaatcttttggagtctctcatgatgcaattgagccgatgttttacatatttcataaagggaataaaaaatttgtaatgataacggacactggttatgtaagcgaccgaatgaaaggtcatattgcgggggctgatgcttatctttttgaaagtaatcatgatgtagaaatgcttcgaatgggacgctatccgtggaatgtaaaacgcagaattctaggtgatgaaggtcacgtgagcaatgaggacgctgcaatagcaatgagtgaagttattaccgatcaaacaaaacgaatttatttgggacaccttagtaaagacaacaatatgaaagaacttgcgagaatgagcgtaacacaaacacttatggcagaaggtattgatgttgggggcaaactagaaatttttgacacagaccctgataatgctacatctatctttactatttaagtttcaccgtttttttaaagctttttcatcgttttttcatatttggggtttattatggaagtatataaatgcgaaatttgcagagaggaaggaagacatggacgagaaagaaaagaatttaaatgaaaacagcgagaatgaaagcacgccgaaaagagaggtcgaggatactttacatacaccggagagcgcgcaaccagtccaagaaactcctattgtagaaggcgtgaccccagaaggggagaaatttgccggagcgacagaagatgcagccgaggcgagttctacaaatgcattttttgaagaagcaagtaataaagaatcagaacctgctagaccggctccagggccaagacgcgctggtacaactggtggcggggcagttccacctaatagagtgaataatggcggaagtggtaacgggaatggtgaaccaccgaaacgcggcaaacactttattggttactttttaacagcacttattggtgttattatcggaggacttattattttctttgtcgcttgggataatggcgataacgcagatacaacttcaaactcaaataataaagctaccaaagtagaaaaagtttcggtagatacaacatcagatgtaacaaaagcagtagacaaagtgcaagatgcggtagtcagtgtactaaattaccaatcatcttcatcccttgatggaacaacgacttctgaacaagaagcttcctcaggatctggtgttatttataaaaaggcaaatggaaaagcctacatcgtaacaaataatcacgttgttgcggatgcaaataaattagaagtaacttttacaaacggtaaaaaatccgaagcaaaattacttggaacagatgaatggaacgatttagctgttcttgaaattgatgataaaaatgttactacagtcgctgcattcggcgattcagattcattaaaacttggtgaaccagcaattgcaattggtagcccactaggaacggaattttccggttctgtaacacaaggtattatttctggtctaaaccgtgcagtaccagttgatacaaatggcgacggaacagaagactgggaagcagatgttatccaaacagatgcagcaatcaatccaggtaacagtggtggagctttaattaacattgaaggccaagtaatcggtattaactcaatgaaaatttcgatggaaaatgtagaaggtattagctttgcaattccaagtaacacagtagaaccaattatcgaacaactagaaacaaaaggcgaagtagaacgtccgtctctaggtgtatccttacgtgacgttgatacaattccagaaacacaacaaaaaaatatcttgaaattacctgatagcgtagattacggcgcaatggtacaacaagtagtatccggttctgcagcagacaaagcaggcttgaaacaatacgatgttattgttgaactaaacggccaaaaagtaacaaactccatgacattacgcaaaattctatacggtaacgacgtgaaaattggcgataaagtcaaagtaaaatactatcgtgacggtaaagaaaaatccacagatattaaattagaagcagcaaaaacaactacatgataacaaaaagccattctcttgaaaaagagggtggcttttttctgtggaaaacttgtggatagcgatttttttcggatatagatatggtagagaacaagaattctcctactaaatatagaactagtttgtggatatgtggataacttctgtggataacctgtgtgtaagcagtgaatatcttgtggaaaagaacaattttgataatttaatcaataaacacagatttatttttgaaaaaaacacattttttgcgaaaatataggtcaaaaaagaaaaatgtggatagaaagccatttatccacatttttactttttataagctggatatgtgacaaggaaaataactttacatagaaattcgattcgcgagattgattgtaggagaaggggttccgctgtttagtgaagtttggattttggatagttagatgacgattttacctgtggataagctgtggacagtgaaatttggctatcatatatattgtggagaatatacgttcggacacaaaatagggaatgtgtctgtggatatgtggataattattggggataacttgtgtataagggcgggataacttttagagcggaacttcttttatttattttgactagtgtaatgagggatttttgatgtatgataaaagtattaaaaaagataagggtggcataaatgaatatccaaattgtaacggtcgggaaattaaaagaaaaatatttagtgcaaggaatcgccgaatatttaaaacggttgagcgcctacgcgaaagtgacgattgttgaagttccggatgagaaagctccggaagtgcttagtgatgcggaaatgaaacaagtgaaggataaagagggtgcgcggattttagcaaagattccggacgatgcctatgtgattgcgctggcgattgatgggaaaatgaagtcgagtgaagaatttgcggcggatttggataagctggcgacttatggtaagagtaaggtgacgtttgtgattggtggatcgctgggacttagtgaggcggtgctgaagcggagtaatgagcggatttcgtttggacggttgacgttgccgcaccagttgatgaggttggtgctggtggagcaggtttatcgggcgtttcggattgttcggggggagccttatcataaatagctaaccgcttgaacgggttgtaatcaacaacttaacttttgaaagctggtttacttttttcgataagccatttttcaccatttgaaattgtatgatctgcatgataaattaatgtttttcgaagtgctgcatattctgttggtaatgtttcatagtttagaaaatgatagtttagtgcgatgctttcagggataattccaacgccaagtttattattgcagatttcaacaagtgtttcaggaatattgatctctgatatggaaacatttgggatattaaaatcgttaatgagagtagccagggcacggtatgaataacattgtttgctgaagacgtataatcgttcttcagctaatattttttggactgattttccagctgtgttgcctgcgaaaactagtttatcccatgagagcgtttgtgagatgatttggctatcttgaaataaattttctttttcgagttcagcgacataagcgatggttagttctctgttagctatttttggtattaactcacttgtacttccgctaacgatagataattttttatttggaaactgttgatagaactttttaatgattgtgttaaattccataggcaaagaagattgcgtaataccgattgagatcgtttcttcttcattattgataatatcaatcgtttcctcccataataaaatcatttttttgaattgttgatagattttttctccctctttagttagttccacaccattcgagtgccggaagaaaagttgagtttggaactgtttttcgatattttttattttattggacatattagactgtaaatgatgcagttcattcgctgctgcagaaatactctttagttcagctactttattaaatgctttcatgttttcaatatccataattttctccttttggtatcaaaaataatgataccggcatatgatttacgcatttcaaatgatagcacagatagattatactttatttacaatataaattcaatttgggggttaggttatgaatacaaccattcaacaattagttaaacatgtttcagtaagagaatttaaaaatgaaagattatcagatgaaaccaaacaacatttattaacggctgcgagaagtgcatctagttcgcattttgtgcaatctttttctattttagaaatcacagatgaaaaactaagaaaggaactagctgaaattacgaatagtgcttcttatgtaaatcaaacggggaccttttatgtgtttgtaggagatttataccggcaatcaaaacttttacttgagaataatagaactttagatgggttgagaaatatggaatcattactcgtctcggtgatagatgctacaattgcagctcaaaacatggttattgctgctgagtctcttgatttaggaatctgttatatcggtggaataagaaatgatattggaaaagtagctgaattgctaaacttaccaccatttacgatacctgttttcggattaactgtaggcgttccagaatataaaaatcaagtaaaaccacggctattactagaaaatcaagtaggagaaaatcagtatccacatgaacagtttacggatttaaaagcgtatgaggaattgaccaaagattattatgctttacgtgaaaaaaatcagcatcaaacttcatggggagataagaatgtagagttttttgaagaaatacgaagaccagaaatagctagttttttgaaaaaacaagggttcacactggattaattgattttcgttatagagtgtataaaaaataatagggttaaaattatgaaaagctggaagagtattttttccggctttttatttgatttgggctattatttagtcatagaaagcttaaactagattagatggggatagatttgtataattaatatggagttaaaattacactaatatatcctaaataaatttcataaaaggaggagccaaatgaaatttctaaaaaaatacggtttttactttttattactcggcgttttgagtgatttcctaacaccctacatacttggaatcttttacccagaattaaaccaaatgactcgggttatgagtgtgtttggggatgtgactagtccggtgcggggagcgtttttggtttggtcggtggtgtctggggtgttttttgtgctcgctttgccggcgatttatcagagcgttgttaaaacttcgcggactttggcgattttgcttgcttctgcgattggtttgtatgggattggcgattgtatttttacggggttgtttagtattgatacggagcaggcgagctggacgttttcgacttgggttcataatattggctcggggcttggttatgcgggatttttgatttttccgttgtttctggtcattctttaccggaaaactggcgataaaacccgcagcaatatctatctagttttactcattgttagtttgctgtcggctggtgtttatgggcttgcgcggattcctgctgtgaatgacttgccggttttagataaaattggtttttgtcagcggattagtttcttttttaattatttgccgattgttgtttttggaattgatcggattagaaaaccctagattgtttaagaatctagggttttttgttcgcaaagttcgataaattgctggaaatcttcttgttttgctagttttttgacgaagctgcgttcgtttaagatggtcacgagttggccgaataattcttcaaaagagttgtcacgttcttctttcatagtgagtaggaggacgagtttgacgcgatttccgccccagtcgattggtttatcaagtgagcatacggcgacggcattttttttcgcgcttcgctggatggcatgagggatggcgtagtagttgccgtaacaggtgcttgataattgttcgcgctcgaatacttttgctacgtaatcgggggcgcagtagtcaaatgcagttaattgttcgcaaagaaaggtgatggtttcttcttttgatttgaagttttgttttggaaagaacagttcttttttgaaaaattttctggagattgattcagttttttgcttagtttctaaaatatgcttgattttttgcaaatcgctctctgctaaaagcaaatcgtagtgatagactgggatgtcggttgttaggtttaatggttcggcggttaaaattaagtgaatttctttgtctaaggtgaattgttttatgtcgaaaatggactgggaaacgagtaaatcaatcgaaaaatcaggtattttctttagttgattatgaattaagcgttgactacctgcgccgtatggggtaactaagagtatctttctctttttaccgtgattaattgtttctgaagcggacagaaagtgtaacgcgatataagcgatttcgtcatctgggaaagtaatcgcgagctctttttggataaaggcagaggcataaacactgacgttgtagataaatggaaacttgttttttaattcttcggtgagcgggttggttaaatattgtttgtgattggctcttttgtaaagggctgaaatgtgggccactagataggtggctattttttcgtcagctgaaaagtcgatatggaaattttggtccactgcttcaaggagccgagtgacaacgctaccaaaaacttgcgcgtcaatggtggaagttgtcgttagtttgccggaataaagccgggcgatatagcttagttcttgggttggaatattgatttgcagttctttttctaatgtttcagctagatgtgctgccatttcaaggctagttttatcttgctcgagtaaagcggttcgctctatatagctgcccatactgattcgctcaattaaaacagcaatatgcaagatgaacgaaatcgtcgagaaatcattcatgaaaaattcgtgctttttgtggtaggcaataatgagctcggaaagttgttttagattgcagtaatcaaagtaatcggcgtacttatcaaggcttaattgatggttttcgatttcttgattgaggaacaggttgaagatgcgtcgtttttcttcttcaccgccctcggttagtagttcgttgttttttcgaataatacaaagcgactcatctttttcagcgataacgatgttaagctctttaataatacgagctaacgtcgattcactaataaaaaattgatccgctaaatcatagaaattagtatgatcttgttcgataatatggcgtaataattcaaaatgtagattttcgttatttttggttagattcatttgtgaaagctgctcgtttggcattagaaaatagccttttccagcttttgatgcgatgattgtggaactaaatgactggttaatttgcataatgtcatttcgcacagttttggaagaaacgcctaacatttctgaaagtgcttttgctgttactgtcttttggctgtcgttaagcttttctaacaatgaacgttgcctttctgaaatagtcattatatcccccctaattctcccttaacctattgttattatacaacaccaaatagagaaagagacgagtttttttgtcccaatctctatttaaatggctattaattagcagcgatgttttcttcttcggcttctttttctaaagcgacgagatttttctcataaacttttaggaatggatagtacattaggccgtttaagaaaatcaggatgaatacgagaacgatggctcgccagtccatggtggatagaaatgctccaattggtgcgggcatttgccaggagaagacggcgaacgtttttccgacaatcccgaaatacatacaaagataggtgatgacgccattgaatacggatgtgaaaatgaacgggaagaagaaaatcggattcagcattagtggtgttccgaaaatgagcggctcagaaattccgaatatggaaggtaagaagccgactttcccgacggtgcttagttgtttggacttggaccgcatcattaaaaaggcaagtgcgagaacggaaccagaaccaccgatgataacgaaatacgtccagaatggtgtcgtgaaaatattcgtcaaatcttgtccagccattttttcagcggcgttgattgaaaggtttccgtcacgaattgggcctagaattccggcaagtgcggcatcgtgtacaccgaagaaccagaataggtgaactaggaaaatacttagaatcgtgaatggtaagctatcggctgctttgaagctcggcgccattttttcatataagaattggatggctgttgtgtctagtaggttgaaaatgataaagataatcgagaaaaaggtcattaaaatgataccaggaactaaagctgcgaatgtctcggatagggaagctggaacgctatcgggcatggttattcgaccgacatttttcttgcgcatccagtgataaccttctacggtaacgatggcgacgaaaatcgaaagtaatattccgcgtccatcaaggaaacttatgtcgacttctttgccgtcccagcccattttgattggattaagtacgagcataaagaaacctgcgatagaaaacatgagtgggcgtaagaaatcttcgtggtagtgtttgcataaataatacgtgataccgacgcaaatatataacgacatggcgccaagtgtgattccgctaatccagtttaggattaaatcatatttttcagcaaagttagcccaggcaagcaggaagccgtttttcgtatcatctgttactggagccgctttcaaaataatcggaatcgaaccaaacaatgtaattggcagcatggacataaaggcatctctggttgctttcaaatggcgttgctggctaagtttattagccagcggggaaatatattgatccattttttcgctaatggtattaaatcgcatgtttttatcctcctattaatttctggatgtcttcgtaaacccctttgccgtccatgatgccgtattttactggtgaaatggcgtggactgggacgctgacggcctgttttatttgtggcataaggaaacggatttgaggcccgataagaacgaggtcgacgccgtccaaataatcggtatactcggattcgctataagcagtgacgtttaatgtgttgccagaagcggcttcgatttttttcgcaagcattcctgtagacataccagcattacaaactaacatgatatttttcattttcctgctcctttttttaaaattctcttcgtttgatgagttttccctgactttcaatcatttctttgaaccagtagtaggaagcttttggttttctgatttggttgttttcgaaatcaactgccacaagtccgtaacgtttttcgacaccatttttccaagaataaaggtcgaacggagaccaagcgtagtagcctcgaacgtcacaaccagcatcgattgcgttgaaaatggcgttaatatggtcattcataaaggcgattcggtaggcatcatctacttgtggcactgaaacatcttcgcgaacaccaatgccgttttctgtcacataaagtggtaattgatagcgttcgtaagcctcgattaagccatcttgtaagccttttggataaatttctgtgtcccattcggtcgtttcgttggcgggatctttcacttgttcgaaccagtttttgataagaactttactttcgccttttttaccgctgtggttaaattgtagctgggtttcgccgccagtgtatggtttaacgagcgtgcgcgaatagtaatttaagccgatgaagtcgacagtgttttgtttaattgtttgtagttcgtctgttttcataaagctgatatcgtgcgattttgctagttcggcaatgagatcgaccggaaattcgccaagtgcggctgtgtcgagaatccagttgttgcagtagttatcagcgtagcgcatcgcgattttcgtttcgatactttcatcgataccgttcaccggcgtgtagctgtgaacaataccaatttgccctggatagccaccttctttaaaagctttgacgcctaaagcactcgcgtacatcacattataagctgcaatcatcgttttttgcgtatcttgatagccaggcgggtagttgccgattttatatccgttagcaacaaaccattttggctcgttaaacgtagtccaattcgtgattttatcgccaaaatggtcataacaaaccttggcataatgctcaaatgcggcgcaaacatcgtgatccaaccagccaccagtttcttcccaatattgcggcaaatcccaatgataaagtgtcacaaacggctcaatatcatattttttacacgtatctagcaagttttgataaaattcgatcccttttaagttgatgtcaccttgcctatttttaataattcgcggccaagataaggaaaatcgataggaattttgcccgccttctttcatcatccgaatgtcttcctcatagcgatggtagtgatcgctcgccacatcgccattctcaaggccagcttcgtgcaagtagtagtcccacatcgattccgccttgccatccacatcccaagcaccttcacattgataagaggccgttgcacctccccataaaaagttattattcattagataaactccatttccattgataaatttctcccagttcccgaatcatttccacggcaatatccgtagaagacaagtgaccttccgcatgaaccagcagtaaatccacctctctcattcggttctctgaagatagttttcgtaaaagttccgcatgcgctcggtgcgccagtttaatctcatctttcgcttcagtaattttctgcgtgaaagcttcgatgttttgcagttttacttctttcagtgcctcaaaagcacaacttttcgcattcccggcgtgtaagatgatcgccatggaatcgagttctgttgttagttcgttgctatctgtcacgtaaagacctccttttgatttgtctttactatagctggaaaaatgggggaggtgaaattattatttgccactttggaagtggaaattggttttggtttggaatttaaaggttactaggatatgatgatagttagagagaaaatattacataggagatgaatagatgatgaaaaaaacagtacacggatgggaaataatatctagtttagacgtacgagtataccaagatgaagctggcggggttgcgattttagtagacagagataattttggggatcaagtgccagtgctattgaattttggtgatgatggagtagatataaaagctctttcgcatttaacaaaaagtgttcgagtttcgctggataagaaggtgcggattgaatggcatgatgagtattttgaagagagaacgcaagcaatggagtgcatcgaggtggaacgggattaaccgttaattatatgcaaaaaaaggagagcaacgagatgagcaaaaagttagtaagtattattttcttagggatttgtcttttgttagtgggttgtggtaaagaggttgttgatagtaagtataccggaaaatggaagttggaatcgtcggggattggtatgagcgatggatcaaattacaaggaaacggatgcagcgggtaaagttagtcttgacttggacattgatgcagagggaaatgtaaaagaattgtatattgatgatgcagttgctataactaattcttataaattaaagaaaaaaggtgacgatgaatatcaatatgatggtacattgattagcaaaaaagtatacagttatgaaactgaaagtgataaagagaatgtagaaacaatgctaaaatttcttaaatccaaggataatgtcaaaataactaaaaatgaacaaaaaggggatgaatatcacatagatgtcaaagcagatgaaaaggatttcgtattctctttagaaatgcaaagtggaaaattaattttcaaaaaagtcgatactaaagagaaagttttgattaaggaaacctacaagaaaaattaaattattagaagcgaggagcggaagtccgttgtaaccacctattttttaaaatttatttgtgaagactattctttcgagggttcttgggaggatagtttttttgttgaacaagcattttttatagttaaattcacaacaaatctacattcttaggtataatgtatacgagaagatgaaaatacattatataaaaaggatgtttgtgatgaacttagtggcattattaaaatacatgcaagaaaactatggggagcaaagaaccaattatccaatggctgggaatgaagtcgcaaaaaaatttaagcaaggtgttaaaacagcctttgaaaccaccttattaggagaagattacgaaatatctgcatccattggtacaggcggttgggcaaatgtcccttggatagctgtgcatgataaagaaattagcacaagtgtacaagagggagttaatctagtttatttgtttacaaacgattaccaaggtgtttatttatctttaaatcaaggatatacatatgtaaataaaaattataaaaatactaaattgactttaggaaaaattgctcgtttttggcagggaaatttatccacgttaaaatctgaaaatggttttacaattgacccaattaacctcggccggaaggaatctcgttatactaatcttgtgaaaggttatgaatcttgtaatatttatagtaaatattatgatattaaggatttggaagaaactgataatgatttattatcacaagatttgctgcaaatgctcactgtatttaaagaattaaaaggtcatttaatgttggatgacaaaaaaggtatagaagctacaattgatttcataattaataatggaactttcaatgaattaagcgaaaaagcaaaatcagagaaaatcgttgaaatagaaaaaaagcgcaaattagttttaggtaaagaagaaacgcattcaagaaattcggtagttaaggaagaaaaagtaccttatatcaccaaaagagattatgcgaaagaggctattagaaatacggaaaaaggattgcaaggagagtatttggtaattaattatgaaaaagagcggctaataaagaactctattacaaaaccctatgcagataaaatcaatcatgttgctgaaagtggtgatgggcatggatatgatattatttcctatgacataaatccagatgcgccaaatgaagtaatagagatttatattgaagttaaaacaacaactggaaatagagatgctccattttatttatcagataatgaattaaatgttgcgagaataaaaggtgagctttataaaatttatcgggtatatgattataatacagtgccaaaactgaagattattgataatttattcgatgagaccctagaaataaaaccaatcaattatatcgtaaaaggagtgaaccaaaatgacaaacacactaaaaaccagttaccaaaaaacaccttataaactaggcgggaatggcccgcgcaatgtgggtgttttaacagaagcacttcaaaatatagatgataatttagaaagcgatatttacggaaacggtgcagttattgaagactttgaaacaaaaatcgcgaaaattctcgggaaacaatctgcggtatttttcccaagtgggacgatggcacaacaaatcgcgttaaggatttgggctgaccggaaagagaatcggcgcgtagcatatcatccgctctctcatttggagattcatgagcaagatgggctaaaagaattgcagcaaatcacgccactattacttggtacagcgaatcagcttttgacaattgacgatattaaaagtcttcgcgagccagtttctagtgtgcttatcgaacttcctcaacgagaaattggtgggcaactacctgcttttgaagagcttgagaagatttcagagtattgccatgaacagggtatttcgttgcatctggacggggcgcggttatgggaaattacgccgttttatcagaagtctgcggaagaaatttgtgcgctgtttgatagtgtgtatgtgtcgttttataaagggattggcgggattgctggggcgattttggctgggaatgatgattttgtgcaagaggcgaaaatctggaaacgacggtatggcggggatttgattagtctgtatccatatattttgtccgcggattattattttgaaaaacggattgggaaaatggcggagtattttgaagcggcgaaaggattggctgagcgatttaattcgtgttcgggcgtgaagactgtgccggaagtgccggtttctaatatgtttcatgtttattttgagaattcggctgatgagattggggcaattttgacgaagattcaggatgaaactggcgttgggatttcggggtatttgcaggagaaatcagcggatgtttgtgcgtttgaggtttcggttggggatgcgtttgcggaaataccagcaaaaaatttagaactagtttttagatgtttggaaaaggaactttgactataaatttggatatgaaaagacaagctatgttctatagtagcttgtcttttttagtttgaattatattttattttgagtgattatttggtcttcataagattttaaatcggataggatttcattaattgtcttagttttttcttttggcatttctaaggatgtctcttctttttctataatttcatcgtaaccttttctaggttctttaaacattttatcaagttcatcagagcaactaaaaattttgacgtctttccccgcagtaaaactcagatttttatcattatttatgtatccatcaatacttatgccaataggattaaattcttcattagtaaaagtgactgttttaaaatctggaatattgtgtttaaggtacaatgtaactttttctttttgctcattaaaaaaagcttgatttttttcttgctcttgatgttgcatataaagataacctcctagtatagataatattgtgacaattaacacaataattagtataataattttaattcgttttgacataaaaggatgattgagttgactactaaaaaagctttcactgatgaagaatatttcaagctttccgaggctgtttatcaagatggcacattaaatagtaaaaaaattaacattgaactaagtgatagaacaaaaagtaattggaaagtagtgtcaaaattaaatgatagagctactaacacacaagcttttgcagttattccagaagaaaaaggaaaagatggtaaaatctattataaccataataacatgatttttgtctatcgcggaacaaaagagtcaaaagattttggcagtgatattattaatgtatttgcagggaaaaattctagaactagcttagacagaaaatcaaaaaatcctttccaagtctctaaagaatggacagaagaggtattaaaagaatttaatcctaaaaatcctacttctactggacatagtttaggcggagcgctatcgcattataattcaattttatacgattttaatgcgactacatacgcagctcctaatatttatcaattattacctgaagataagcaaaagaaagttcgtgatggcttttataataattcaattattgatttcactcatgatgatgacatgattggaacttttgatcaatttagttcacctattgtaggttcccaatatatagcagaacgaaataacgtcaaagttggagtcaaaggagtttttggagctattccagggcactacaatgaaacatttgaaggctgtttttctagcgatggaacgatgaagttaaaagtagatgtagattctattattaaacatgctcaagacattgataatattattcagtcactacaaacgaataatgatgacttagagaaccttgaagaaaaactacaaataggttccaagaaaatacaaaatcaattagaggaagaaaaaagaattggtggagtttatagtgaattgactacctgggatatagatgatgttttaacagaactatgtacaaaatataaaaatggagtttattgtttttataatccgaatgagtttgaaaaatattatgaaatgaatcatcagacacgtagactattgaaaaattttcaaatagagcttgttgatgcagcgcagtcttttcgagaaacaaatacaagtttaggagaatggatttctaataacaattaaaaggaagtgagattatatgtatagcaatacttatcaacgcgaatacgcacgtgcaattggggatacatcttatgatttgagttatcacttcaaattattgagcgagaactcaagaaaaaagatttaactgccaaagaacgttcgaatttacttgtagcagaaagtactttgaaaaaacaagttcgattgaaaatcttaaagctagatgcaaaaaaatcagtaggaatactaactcagcaagctagagaagaaatagctatgattcaaaaaggaaatgaaaaaattggagatgaattaaaaattattcaagataaattagcggatgcatttgaatccagaactgcaaaagctgttcaaagttggatgaagcatatccgggaagaagaattggaagagcaaaaagaggttcttgttatttgtaaagaaagtatcagaatggattaatatagcggtgaaggttatatttgaaggatatatcacgtaaaatcaaaatattgaagatattgatagaaatttcttagtttttgtgtgagaaatcgaaagagatgcatttattaataatatgctattaaggattttgaaaactagcataataaaaatttaaaaagatctagtcatataacccacctatacgaatgtgtattgttttttaagtatcaaaagtagttttttggttcatttgtgtattatttcacttaaattaataaaaagtatatttttatatcttttttacccctgtttttaatgaataaatgtaattaaatattcacatttggaagcgttatttcaactataatagaagtaggaagatgaattttaaataaagaatttatggggatgaaaatatgagcattattaatagtaattttagaagtctaggttcatacataatggagaatatttataaaatacctaattatcaaagagaatattcatgggaagaaacagagttagaagacttatggatggacttaagtcaaatcataaatggtgaaactgaaagtcatttttttggacaaattgtaatacatgtagataaaaaagaaaaagcgaaactaataatcgatggtcagcaaagaacgagtacagcagtcatctttttagctgcgatgagagagttgttcacagagatgtataatgcaggctgggatgatgcacaatttgatgcgcaagacattactacgaaatttatcggtaggtatacacaaactagggatgagaggaaattaatacttggtgaaaatgataaaagctatttttcaaatagaatacaatcggtttcttccgaacaactaggtcttcaaaaagcaactaaatctcaaaaaagaataaattttgcttataactacttttataaaaaattagaagaagaaataaattcttctgattttcttgaggataaatatggtcttttaaaaacatttttcagtacttttacagaaaaatgctcagttatgtttgtagaaacagatgattttaatgaggcatttattatttttgaaacattaaatgcaaggggaaaagatttagagactgctgatttattaaaaaatcacttatttaaaattgccaataaaaaggttggagaagttaaaaaaaattggaaacaaatgttggaatttatagggacggttgataccacgaagtatattcgacatttttggaattctcaaaatgtatttattagagaaaaggatttatataaagaaattagaaaaaagataacaacccaatttgaagcaattatttttatagatgatctagttagattatctgaagtttatggaggaatgaaaaatcctgcagaagataatttttttgagacggattctcagcaagttttaaatgatttaaagcgattaggagcaaaatcattttatccaattattctagctatggtaaagaaagattatggccctaatgagatttatgaggttctttctgctattgaagttctggttgtaagaaattttgttatatccggattggtagcaaataaatatgaaacagaattttcaaaaatagcttttaaaatttatcaagaagaggttgagagtgttacagaaattattaatctgattagaactaatattatagcagatgatgtttttttgaataacttttctagctttaaaactacaaataaacttagattaagatacatattaaaaaaaattaatgacagttactctaaagaaattgctgttttaaacgataataataaaatccaccttgaacacataatgcctataaaagcagatggatgggatatcattaaagaagaacatgaagaatatttgtggaagattggaaatcttactctattgggaagcgaatataataaaaaatcgaccaataaaatatttaatgataagaaagatatttatgaatattcggaagttcagttgacaaggaagttgttagattatgatgaatggaatatagatgtaattaaagaaaggcaagttgagttagctgaacttgctgttaatatttggaaagtgtaataaatttatataaattctagcattagatttgatatttcataaaaaagtggaaggtatcataattaatggattttagaagagtaagtttatttaaaaagataggaagaggcgaacgtttgttatgcttcttgttttcttgataagcagagtttgaatggcaaataatttaaaacaaacactaagaagtggtgagatgtatatggtaaggaaattttttggatatataggaaccagaagatttaatatatacgaagcattagtttatagaaataggtatagtttaaagaataaagagaagttaattttttatgatggaacaagtaaaataaagcaaaagattgcaccgaaaagtggaagcaaaaatggaagaagtcctcattttgcatattatccaaattcgtctcatgatggagtaggaaaggaaatgactgttacacataaggcataccaagaggctatatctactttgaaaattttttgtatagaaacattagatggtgaagtaattatacttgaagtagaagaggctaaactggaatattatattaatgatgaaggtcagtattatttagttgatattcttatagtattgaaaagtacatatccattctattatttttataagtgggagggaatattagctatagaaatctgggtaagccataaaacagagcaaaagaagattgaagcgctaaacaggaagggtattccaactatagaatgtaagatatctaaaaagttgttattaaatgaggatatccaaagcgataaggaatacttaacgaatgttcaaaaggtaattaatcgttactcagatataaaatttcatttatacggaagatttatttctgatgcaaaaatcgatgaaacttcagtgtggggagagaagtacttggaatttaaaaactatcataatgaaaaaaaaagaatggaactgcacttcagaaaactagaaaaacaaaaattagaactggagaagaaaaataaggagctaataagtgaaaattataatctggatttagaaataaaaaataaacatactgtaatagagaaattgagtaagaataagatggaagttgaagctaataaggaattattgaaaatatgtaaaattgaaaatggaaacctgataaaaaaagtgtcagcattgaattttgaattagtaaaaatgaaagagtataaagatcatccaataaaaactttctggaaagataagatccgattcaaataaaatagtgatatttttttatgtgaaatttgtgatcaaaaattaaggtcgtttttgaatatttaatatctcgatgctaagaataaaattatgaacttataagaacggagcgattttatgggaactaatagagctagaattgataagtctattgaaaatattcttaaaggaaagaatattgaagaagctaaactacacttgccggaaataacaagcacaataaaaactggttttattgaaaaagaaatttcggaacaagtctatcaaagtattataggtgttgtaagcgggaagctttcaaagatttatgacctagatgaagataagtgtaaagagattacaagtgattttattaaaagagaacaatggataaatgagataatggagttggttgaacaggataatgtaactggaatatcagatgttttgttgaaggccttaaaaatagcgctaggagaaactgttaaagctgaacaaaatgaaacttactttgtagagaaactattgtatgaaatcatttttttatctttagaaaacactatgcaaggagctttggaaactttggaggaagggataactattccacaaattcgaaaagaatttataaaacctcttgctgataagctatttgaggaagatataaagacagaaattccagctttagtattaggtaaaacaactttagctgtaataaataataaaatcgctgataagttaaaaaattttggtggcttttaatgagtgaaatccaacatttttcagagtttatagatggggctacaaattattggtataagaataaatttgatcgctgtaatgcatgtgatatggttaacgttatgttaacagtgttcgatggagatatttctacaccaggtaaccaaagtaataaaattcctcggaggatatctgtatctgcaaaagtatatgatgtggatcgttggaatcaatctagagaggaattaatagaattacttaattgggtatcaggagacctatttgagatgtcttttgagaaaaatgaagaactatttgacgcctttccattagaactcccaagtcctcgaaaagagtgtatcacactattttcaggtggattagattcttttgcaggctcctattacaacttcttaaataatatttcaagtgattatgtaggatatgttaataaagccgaggaaagaacataccaaaagcgcttacagtctttttatagaaagattttttctgcaggtggtagtgaggttgatatcaggaataaatatcaaaagcctaaaattttctactttcaatcaactagatctttactatatttatctctagcaatatcaaaagctatttctaattctgtcaaagaaattagaatgtatgaaaatggtatactatctttaaaccctgaatttggcagatacacaacaaaaactacacatcctaagacaatttttctctacaataaacttttagatactcttggatatgatattcgaatagtaaataaatttgaatacgaaacgaaaggtgaaattgttgaaaatatgaatctggaatttaaatcacaaataaaaaatacttttacatgtggaaaaagtagggtcggaaaagagtataaccacacaggacaatgtggcgcgtgtattccatgtatattaaggaaaatatctttggcagcatatgataatgagcattttgacgctaaatattttgtgggttataaaaacgtagcttctgcgtcagaaaaatatttaaaggattacattaacaatatagggtatttcgatgcttatgttgaagcaattaaaaatgaagagatttttggtgaaatatcaaataaccagcataaattccataaggaaaataattacttgagatatcaaaaagtaatgtttgataaatttgcatctgaatacgaaaggtttattgcgaaatatgggatacattgatcttcatgtgcatatagatttttattcagagccaataaagattgcaagagaatacgaaaggttgaagatatatgttatttttgttacttatttgccagaaatatttttgaaaactcgatatgaatatgataattataaatatgtaagattaggagtaggatttcatccagatatggtaggggaatatgattttgataagaatgcgtttgaaagagggctacagtacactagatatattggagaagtagggctggatttttctaaatcgaatcaacaatttaaagaacaacaaatagaaatatttcaacaaataactagcccaaaatataacaaaggaaatgtgtattcgatccactccagaaaagctgaggtagaagtactgcaaattcttaaaagcaacaatgttaaaagtgcaatctttcattggtatactgggggaaaacacatgctaaaagatatttcagattcaggatattttttttctgtaaatcataaaatgcttacttcgaaaaatggtattgatattattaaaagcattcctaagtcccaattattatttgaaacggatggtccttttgcgagaaaagagaaaagtattgtttatccaagcaattttaaacagatttatgcggattttgaggaagttattccaggatttgaaaagatagttttctctaattttaaaagactattatttcaaaaagatattgataaaattaattaagggaattagagtaaattaaggtatttcttaatagtatattgaaagattggaactatggattaattgttaaagagatttggaaagattagcttatagttatgctagttgataagaggcaatcttttgttaagaaattaatgaatttgtagtctgtttttttaattataatgaggaggctccccatgccaaaactaatcatcgacgcagacgatttcggtctatccaaagccatcaaccacggcattatcgaaagctacaaaaccggcatcacaacatccactttactcatgccaaacctagaaactgccgagcacgcaatcgctctcgcaaaaaatcacccagacctattcatagggcaacacacaaatttcttactcggaaaaccatgcgcgaacccggcggaaatcccgtcacttgtcgacgaaaacggggaattccatcgttccaaatattaccgggctaacccagaactgaaattccaatacgaagatgtgcgcacggaaaccatcgctcaaatggaacggttcaaagcgctaacgggtcactacccagaacacattgactgccactcaatcggtgatgaaacggttgaccaagctttctttgatattgcgcgtgagttcgggattcacaccactttaaaatacagcggtgataaaaaatggtcagatcaggaaggttatttaccaattactaaactattggaatcgggcgcacttccatacacaaacggcggtgtctcggttgagaacttccttaacgatgatttcggattattaaaattggcaccaaacgaaatcgctgagatgcattttgatgtcggttttttggatcaatttgtgctggataattcttcttatacgttgatgcggtgccgcgagcttgcgacgatttgtgatgtgcgggtgcgggattggcttcttgaaaatgggtttgagcttattacatttggggatttacagcggtaaaactctatgttatgatgaacgcaacttaataagaaaaactaggggggccgattctggctgagataggaaggtaatgctttctgaccctttgaacctgtttgttagtgcaagcgtagggaagtgaatgtgaaagtgaccggaaaatttatcgcggctactgtttctttgcttatgctaagggacagtaggcgctttttttattgttcaaaaggaggagtttgagtgtttattcacggttttcaggaagaagtagggaatttatggcaagaaacgttgcggcacccatttgtgcggagtttggcggatgggacgcttgagaaggaggcgttttactattatttgttacaagatgattattatttgtcgcattttgagaaggtgattgagaagagtgtggagcaggctgggacggcggaacttgctgcggaaatgagggaagtacaggtgcggcttcagcagtcggaattgttgatgcgcgaacagttttatccgcgggttgggctaacggagcgtgatttttccgagcgaaaaccggcgccaactgcttatcattatacttctcaccttcatcggatggtggattttggaagttttggggtgacgattgcggcgcttttgccgtgttatgcgctttatgcggatataggaaaaatgtacgaaggggcgcggagttcggagccattttatcaagagttgttggatagttatgtggatgaaaattatcaaaaagtggtgttgcagcagaaacggttggtggaacaggcggcgagtatggcggatgcgcgggaactggccctcatgaagcaggcttttcaaattagtgtggaaatggaatgggcgttttttgatatggcttataaaaaacaaaattggcgtgggagtgtgaattatgtttgattttatgacgttggaaaaagtgcgggaaaaagggccgttggtacataatattacgaatatcgtggtcgcgaatgattcggcgaacgggttactggcgattggagcatcaccgattatggcttctgcgaaagaggaaatggatgaacttgcgaaaatggcggatgtgctcgtgattaatattgggacgctagatggtgaacttgttacagcaatgaaaattgctgggcgtgcggcaaatgttgcggggacgccggttgtgcttgatccggtcggtgttggcgcgacttcatatcgtcgtaaagtggtgcaagaattattggcagaaattcagtttgcggcgattcgtggaaatgcaggagaacttgcggcaatcgctggagaagcttgggaagcgaaaggcgtggatgcgggcgttggttcggcggatgtgctgagcattgctggaaaagtggcgaacgaatggagcacggttgttattattagcggcgaagtagatgtgatttcggacggaacacgttttgcaaaagtggctaatggtagcgcgttgcttccaagaattactggctctggttgtttgctcagtgcggtttgtggtagttttatcgccgttcaggatgatgcttttcgagctagtgtcgaagcatgcgcgagttatgcggtggcttctgaatatgcggaaatggagttagaaaggaaacttcccggctcttttcgaccattatttttagatgcgctcgctagttggtcggtcgagaaaactcgtgccaaagcaaaaatccaagaaagcggtgaacacaaatgacttttccacaagtgttaacgatagctggttcggattcaggtggtggtgcggggatacaagcggatatcaagacatttcaagagcgcagaacatttggcatgtctgtgatcacggcgattacggcgcaaaacacactaggggtaaaagcggtgcataaaatcccggtagaaatgattcgcgaacagtgcgatgcgattgcagaggattttcaagtgagcgccgtgaaaacgggcatgcttgcggatgcagaaattatccgggaagtggtgcggaatatacgtttgcacaacttcccaaatctcgtcattgatcccgtgatgattgcgaaaggcggcacggctttgcttgaaaacgaagcaacacaggttttgaaagatgaacttttaccgcttggtacgattattacgccgaatattccagaagccgaagaaattctcggagaaaaaatcacaacgaaggctgaaattgaacgagcagctaagaaaatctatgatatgggtgtaaaagcagttgtaattaaaggtgggcatagcgaaatgacggaagcagctgatttttatttcgatggggtaacggcgaaatggcttacgagcgagcgctttgatacgccacatacgcacgggactggttgcactttttcggcatgtattgcagctgaacttgcgaaggggaattcgcttttggatagtgtcatggttgcgaaagaatttatctcaagtgcgattaaatatccgcttggaattggtcacggtcatggtccaaccaaccattttgcttaccgaatggaggatgggaaatgagagctgaactagctgtatattttatcgctggaacgcaagatattgtgcgcggaacgttgccaagtgtgctagaagaagcactgaaaggcggaattacgtgtttccaatatcgcgaaaaaggagctggctcactccaaactgcctccgaaagaaaagaaatggcgctagaatgccaaaaattatgcgcaaaataccaagttcccttcattattaacgatgatgtcgccttagccctcgaaatcggcgcggacggtatccatgtcgggcaaaccgacgaagcaattcgccaagttatcgcgagttgctccggcaaaatgaaaatcggtctttcggttcattcagttagtgaagcaaaagaagctgaacgacttggcgcggtggattacatcggcgtaggaccaatttttccaacgatatcaaaagcggatgcagagccagtgagtggaacggcaattttggaagaaattcgccgggctggaatcacaataccaattgtcggaattggcgggattaatgaaaccaattcagccgaggttctcacagcaggtgcggacggagtatcggtcatttcagcgattactcagtcggatgattgccactccgttatcaaacaattaaaaaacccaggctctccctcctaaaaaggcaaacctgggtttctcatttttataaatcttcaccattggtagcaataacgtttttgtaccaatcaaaacttttcttcttataacggtttagcgtacctgtgccgtcgttgttgcgatcaacatagataaagccgtaacgtttcttcatttcagcagtggaggcacttacaaggtcaatacagccccatgaagtgtaacccatcaagtcaacgccatctttaatcgcttctttcacttgcgataaatgagcgctcaaataattaatacgatagtcgtcatttactgtgtagttgccgttttcgtctttttctagttgatcgatagcgccaagaccgttttctacgatgaaaagtggtttttggtatctatcccagaattcgtttaggacaacgcgtaagccttgaggatcgatttgccagccccattcggatgcttctaggtaagggttttgtacgccgcctagaatgtttcctgcgccagctttgcgtttcgactcgtcagctgtttcggttgtgctcatgtaatagctgaaggaaatgaaatctactgtgtttttaagtatttctaggtcttcttctgttacgtctaattcaatattattttctctgaaatagcgtttcatgtagcccggataagttccgcggacatggacatcggagaagaagtagtttttgcgctctgcttccataacagcgataatatcatctgggttggaagttagcggataagttggcattgctaggaccatgcagccgatttgagcttcgggcatgatttcgtgaccaatttttgtagccagcgcgctcgccacaagttcgtggtggacagcttggtataggtctttttgtgataatttatctgggcttgtagaaataccgccgctcatgaatggtgcgtgtaaaatcgagttgatttcattgaatgttagccaatattttactttgcctttatagcgattaaatacggtgcggacatagttttcatagaagtcgatcatttttctatttacccatccgtcgtaagttttcgataagtgaagtggtgtttcatagtgagataaagtaatcagtggttcgatattatgtgctagaagttcatcgaataaatcatcgtaaaattgtagtcctgcttcgtttggctctgtttcgtcaccatttgggaagatacgggaccaagcgatggaagtacggaaaaccttgaagcccatttcggcaaaaagtttcacgtcatctttgtagcgatggtagaagtcgattccttctaattttaagttatctggtgttggaccgtcagtaatgtgaccgaatccgccttttggagtaacatcttgaacggaaagtccttttccatcgacgttgtaagcgccttcgaattggtttgcagcagcagctccaccccataaaaagtcggccggaaatcctgtatttgtatgcatgttaaaaactccttttctacattttaaagtatctatgaaaaaaaccaaatacttttctaaatacatgcaaaaaaacatggtacttagaaaaatatttggttatgcccggcttacgtcggtaacattccgatttatagttaaaatatatcaaaaataaggaagatagtcaatggaaacaaataacaccgactctattttgagccggtgttttgactattttttccgtttgaaaaggacaagggaagagagcataagtgtaccgaataaaatgctagatgtggtttccgtgtcccctgcttttggaagtggcagggttgtttttgttgcgctggattttgcttgctttgtagctgttttagttgcttggctagtaatttgaatcgggttgtttactatttttgaatcggcggatttttctggttcattttcgctagaatcagcttctactaccgttgattctggattttctggagtggtaatttctggtttttctggtgttgcgggatctgttggtgtagatggttcgtcaggtattggggttgccgggtctactggtgtgactggttcttctgggttatctggttctggatcgttttttggtggtgttacaggtttggagcgttcgtctagttctgtttgagcttttacaatgttggcctgaagcgtatcttttaactcggaagcaggaagaacatcgacaagcgtttgagcttgatcaattaaatcctgcgtagtttcggctttaatcgagtttactgggctgtcctctaagaaaagctggttgacagcttgtatggctgcctgttcttgtgctatgcgcgcatccaattgttgttgagcattattaagttgttcttggaaagattctttttctgaactagttacagtattaatttgttcctgcacagcgttaatagcattttgatctgttatagttaaaatagttcctgtggggttattatttaggaatagctcattaatagcagtttgaatatagtcgtaactaacggttacttttatcactttatcaccacccgtttccgttcctgaacgaacaaaggaattttcttcataaattactttacctgtagtcacatagccacttggatgataaacggtgaaatcggataaatcaacagaataggtgccgtctgtattggtggttccaaaaaatgttccagttagcctgccttctgaggtataaattgcaatgctaaaagatgataatggtgtggtttttcctgtgattttcgtgtcaccaacatggggcgtatctaaagggctagtatatatagttgagacattatgtgactcttcataagcggatgccatggcaggtgaggcaataatagaagtagttaaaacggaaacagtaaataatatagttgctaagttcttaaaatatttattcatttaagcggtcgttcctccaatagaaataattttgtcaacttagcatactattattagggtactaaaaatagtagcgaaatcagtcgtatttccggtttgcgaagtgcgattatgtctgattcgtcacatttagttaataactatgttatatcccttgaaaaaagtctttttttagtcaaataatccaacgaaagtatttttgttcttctgagagaaagatatttcgacaattgtttgttaagcgggattagagggaactaggtagaaggaacggtctaatgagaatgtttttttattagtaaagatatttacagaggaggagtcatcgtgggatcagctttttcagctattttgtcaccggcagtggggattttgattagcccatttccaattgtaggacttattttgattttacttagtaacaaggctcgaattaacagtattttttatacggtaggttggattgttgggaatatagctattttctttattgggttattcttaatgagttcggcggttagttcgtccggagatcagtcaaccttggtcaaagtggtacttattgtgctaggggctttacttatacttctcggcgcacatgatttcacaaaacgtccaaaaaacggggagaaggctgcaacgccaaaatggtttgaaaaaatgagcaatattaaaccgggaggcgcgatgatttttgcgtttgtgctttcggcagtgaatccaaaaaatatgttgctttcacttacagcaggagtgagcgttggggcgctgaatttatccggtgggcaagaaacaacggcgacgattatttttggcattatcgcttgttgttcaatttatgtccctaccattgcttttttattggctgggagtaaacttaacaacgtattagatagcactcgtaaatggcttatccaaaacaattccgtgattatggctgtgttgttcttatttatcggtcttagtgtcattagtaaagcattctaaagcatgaaaaagctattagttctctaactagtagttttttgatttctagcacaacttgttcacattttgcgttgtgatagttcacacaatgtctacagacgaggaaaatgatctatgctaatatggctatacttgtctgtttaaagtggataagaatacataaaacaaaaaggatgggttacatgtttgacaaactgatgggaaaagctgctattgttaccgaatcttcttatggtattgaacgttttttagatgaagacgaacaaattattcaaatttttaaatttataagagatgaagttattattacttcaaaagggatttttaacattgatgcacaaggtatcactgggaagaaagtagaatataaattctttccgaaaaaagctctaaagtatgtttctattgagacagcaggtactttagaccgtgactttgatttgaaaattggtgttgatggaaacacagttgtaacgcaaaatacatccttttcggctccaatctcattgaaagtgcataaaaatgatacagaaatgggatttgcactttataaaatgattaaaggaatgctataaatttcaacatactaaaaagagaagacggatttcgtcttctcttttattatttccagtctaaattagctgtaacaggaaaatgatcggaagctgagaaaccatccacttcgtctacaatagtttcgtaagtacatacctggaattcttcagaaacgaagatgtagtcaattttttctagctcatttatagggcggagtgggcggaagtcgtgaaaacttccgatgggtccttttgcatgtttttgagagattagttgtgcatcttggtatttttttgttatgaagttataagtcggtgtatcaggctcggtgttaaaatcgcctaatataatcacgggtgaattttctgcaatggtggcagctttttttagtaaaagttggcttgcaaatagacgagcttcctcagagatgtgatccaaatgagtgttaaaaatatagaactgttttccgtccgaatcggcgaatttcccccaaacacaaattcgcggaaacatggctgttgagtgaatggaaggaacatcaggcgtttcggaaagccaaaaatgaccttcttgcaacaaggtaaaacgagtagaattgtaaaaaactgcagtaaattctcccttttcaaaaccgtcatctcgtcctaccccaaaataatcccaatcctgcatttctttcatgtcgcgcatttgtggcagaagaggttcctccacacccatgaaatcccattgatatttatcgagtaatgattttgttagtgttttacgcaattcccagctctttttacgctcagaagtatcatcaaaacgaatgttaaaagtagttacactgaacatgattccacatccttcttttcattggaatgttttacaaagagagtttagcatatttatgaaagcgtttcactgatttgggttttatgtagtatatattctacattttttcaggggaaataaaatcattgtattgttgtagaaagggagtgtcactatgttgcgaaaaagtcggtggttgctcatattattactattgatagtattagtggcattatcagcatgcgaggacagcgggaatggagatatttcgggtgcgccagctaaaatggaaaaacagcatttccctccaactgatacgaaaaaaggatggatagaacttcttgcaacggatggaatttcaagtcaagataatctgccttgtgtttatgaagaggcagaatctgtagaaaaattggaagttcatatgaaagaattgagtacggcaagcttaacctatatttatattgacggccacatcgtacaaatggaacaaggcggcgacgaactttcttttcaaattcaattaagtaaaacggaattgagaaaaggaatccatgaattagccgttgtgcaatatcaagaaaataaccccgaaacaaaaaaagtggagtttttaaaacgcgctaattatgaagtgaaacaaataaaaaacgactaataataaacacttcagaaccatatttttaaagagaatgtgaaaaatgacattctttttttgtgctattaatacttaaaaaaggaagatgacgatattgtaagtagcttttcgtctttaaaagaattaaactactagtgtttagggtatatattttaagaacaatgattcctaaattgtttggagtagagaaattaaagcatatacatagatactgcattccgactttttgaaatggaagaacttaattagggggatatcatatgggttcatatggcgaattgattcgggaaatacggctatctaaaggtttgactcaaaaagaggtatacacaggaattatatctaggtcttatgcaatcggatttgaaaaaggtaaacacgagattactttgagtttgtttgaagaaattttaaagcggatcatggttcctctagatgaattcttttttatttacagagacttttcttcgacagaggatgatagtttttggattgatttcgtcgagctatcaggtaaaaatgatgttgtagggatgcaggcgttgctagataaaataactttagagcgaacggagcagtcagaagttagaaaagcgatacttcatacgagaattcaaactattaatcattatttgcgtacgaatgtgtttgatgaatcaaacatttccgatgaatataaaaaaattattcatgactatctttggaaaatgcagacgtggactttagaagaggttcgtattttttccaacggcatatcattttttgaggaagaagtacaaattcacttttatcaaattatgttgaaatcgtatgaaaagtataggtactatgatagaggaagactgttattttgccatctatttgctaatctgacagatgaactcatcatacagaataaaatcaattatgcgaatctagtactcgaaaaattaaaagaagcatctgaaacaagtggtagttttaacagtgctttttatcgaatagtagccaattattatcaaggagccatttggatgaaagaaggcgaagtggaaaagggctatcgccaagccaaaagagccattcaaacatggaaagaactgcactatgaagcaatagcagatttgtatagcgtggttttaaaacaatttttagaaaaagaaaatatccaagtagaagactaactatccgaagattttctatttaaaaaacactaaaatggagtcgttttagtgtttttttgtttgtggtaaagaggttttatgtactatatatagcactatttacagagagaaaacaaaggaatgtaaaataaaggcaagaattgagctaagaggaggtcttcgaatgataagttatggtgagctgattcggcaaataaggcagtctaaaaaaatctcccaaaaagaagtgtacacaggggttattagtaaatcttatgcaattgaatttgaaaaggggacacatgcaatatcaagcctattactcgagaaaattgtcgctaagttaatggtgagtatggaggaatttttcttaatgtatcatcaagaggcgttgccggagaaggaagatttttgggaagcttacgcgcggacatgtaaaacggatgaagcaagcgcttgggaatccctttaccaaaaaatatcgttagaaaaagggaaagttaatcaagtgaaaagcgcggcgataaaactggagttagatcacataaaaggcaaacaagtggcggacaaaaaagcggttcaaattttggagaattatttgattgaagcggttttttggacattgcaggatatctttttatttacgcggatgatgcactatttgccactgaaaagccgagtaccgttctattataaattgttaaacacgctggatagataccgccattttgaacgaggaagaagtatttcacaatcggcgctggctagtattatggatgattttatagagaaaaatgaaattgagtatatggagctaatgataaaaagcttagagaaaattagtgaggattgtgatggtacttattccaaaattctttgtatgtattatcgcggaattgtgcggtggagagaaggcgaaaagcgcgaaggcagcgaagaaatcgagcaggcagtagctattttgcgggcattaggttatgagaataaagcggcagagtatgaaaccatgtaccggcaatttgcgagggaaaacaacgatataaaaacgatggaatgaaagctaaaaaggactattctttttggttttctttttttgagtagtatatatgcgacattagaaaattttaagactccgcatagtattatatagactgaagacggcttaaagccacagtgaagggaggggctttggcaaagaaactaattgccaactgacactgcaaatttagcgttaaaaggaggaagattgttattttaaagaaaatatttattgcattaattgcgcttgtagttattatcaatacagttagttttacgtctgtttctgcaagcacacctacatggttagaacaaaccatgaataataatgaaccgtttataaaagagattgaaactgaaactggtaagacgagagcgaatattacacagacagatttagaagcaataactgccttgcgagtaacaggggcaagtgatatcccggcaaatatcgatatgttaactcatttaaccctgttaaaagcggtacaagggacgatatcttcagtgcctaactctgtgggtaatttaaaagagctaaaaatcttaaatcttaatactaatcatttaagtaattttccgacgattgtttatcaactgcctaagttagaagaattacaacttaatgatggaacgattgaagagattcctgcaacaataacgaatatggcgagccatttaaagtttttaactgtaaataataaccgcttagtgaaagttccaactataatattctcaacgaattggtcaaactcatctacgggagaattagatttatttaccactggaaatcagattgtaacggatattcctgccaactatgtaagtaactttaataatggacaaaacatgttagaattttacgatggtcaatttcaaaaacaagaccaactaactacaacacctggatataccattgatgtacctgttggaactgattttaatcaattaacaccagacaaaacgaaactcgcactaacatctggacgaactttactcgcgcaacacgaattcgagtattatgatgatggttcaagttcactaatccacaatggcgtggcagcagcaccgggtcaagcgaccattttcatcaaaagcaagttttccacgcaatcgaacaaatttgccagaacacaagttacagtaaacatcgctgcgctaaacggcggacctattactgtgaaacatgaagatacaaaagggcaagaacttgcaccacctgtcattttaaatggtaaagatggggatccttatacaacgacacaaaaaactttcccaggctacactttagttgcaacaccagccaatcaaaatggcgcattcaccttgaacccagctacagtcaactatgtatacagcgcaaatgattacaaactaacatctactttcaaagatgcccaaggtcaagaactgaaagcgccagttgtggatacaaaagattaccatatccaagacaactatactacaacagcagcaaccattccgggctattctttagtttccacacctgctaatcagaacggaacttttggagctgggaatgtcacggttaattatgtatacaaaaaagacgattatacacttacttccacttacaaagatacgaatggtcaagaactaaaagcaccagtggtagatgcgacaacgtatcattatcaagacacgtatacaacaacagccgcagttttcccaggttatacgttagtagcaacaccaaccaacgctactgggacatttggttcgtcaaacatcacggttcattacgtatatcaagcaaacggctatcaattaacttctacatttaaagatcaacaagggaagacgatctcaccagatgatgtcgatactaaaacataccacgtgaacgatccctatacaacaactgccaaaacgatcccgggttacacattagtgacgacccctacaaacaaccaaggtaattttggaacaagcgatattacggttgattatgtttataaagcagaagattatacattaacttcgacttacaaagatgcacaaggtaaagaattaaaacaacccgttgtagatagtaaaaaatatcatattcaagacaactattctacaagtgcagcaaccattcctggctatacgctagtagcgacacctgcgaacgaaacaggaaccttccatacaagcgatgtcacggttaattatgtgtataaattaacagacttaaaattaacttcgacatataaagatgcgcaaggaacggagttaaaaccacccgttgtagatagcaaaacgtatcatattcaagataactatgctacaactgcagccgtgatcccgggctacacattagtggcaacaccagcgaaccaatcaggcacttttggtagcacggatatccaagtgaactatgtgtaccaagcagttgcttataaactaacttcgacgtataaagatcaacaagggaatgatttagctttaccaaaagtagatacaaaaacgtaccatattcaggatggttacacgacgagtgatattgctattccaggctatacattagtcgcggctccaacgaatcaaacaggtacatttggtgcgagtgatgtaaccgtgaattatgtctacaaagccaatgactacacactaacttcaacatataaagatgcacaaggtaaggaattaaaaacgccagtcatagacagtcaaaaatatcacattaacgacacttatactacgacaggagctactattccaggttacacattagtcgcagcaccagcgaatcaatcaggtacatttggcgcggcgaatgtaacagtcaactatgtatacaaagcagatgattacacattaacttcgacctacaaagatgcaaacggcaaagaattaaaagcgccagttgtagacagcaaaacttaccatacaaaagataactattctactagcgcagcaaccattcctggctacacactagtggcagcaccagcaaatcaaacaggtacatttaatacgagcaatgtgacagtcaattatttttacaaagcgaatgaatataccttaacttccactttcaaaaatgtacaaggaacagaactaaaaccagctatcgtgaaaaaaggatttattattaaggatggctattcgactagtggcgtaacaattccaggctatacattagttgcaacaccatcgaacaaaaaaggaacatttggcgctagtaatgtaacagttaattatgtatataaagcgaatggttatgcattaatcacaacatataaagacacacaaggtaaagacttaaaaccactagccattgatacaaaaacatacaatattaacgacccatacactgcaacagctctgaacatcccaggctacacattaacaactacaccagccaatgaaaaaggtgtatttggcgcaagtgatgaaacagttaattacgtatataaagcaaatgattatacgttaacaactacctacaaagacgcaaacggcaaagaactacaagcacctaaagtagacgcgaaaacttatcatatccaagacacatacaaaacaactgcagcagtcattcctggatatacattagtcgcaatacctaagaatgaccaaggtacttttggagcgaacaatgtaactgtgaattacgtgtaccaaacaaatgattacacgctaactgcgacatttaaagatgctcaaggaaacgaattaaaagcaacagaagtagacgcacaaaaataccatattcatgacacttacacatcgaaagcagccgtgattccaggttacactttagaaaaaacaccaacgaacgaaacaggtacttttaatgcaagtgatattcaagtaaattatgtgtataaagcaaatgattatcaacttacttctacgtttaaagatcaacaaggcaacgaaatagcattaccaacagttgatgcaaaaacttatcacattcatgaggcttatacaacgaaagctcgcttgattccaggatatagcctagtagctgcaccaaagaaccaaataggtgcttttggaacaagtgatgtaacagtcaattatgtgtataaaaaagatgctattatcaaacctattactccagcgaaaccaactattcttacaataaaaacacctgcaagcaaagtaattaagactaaagtagttaagcaaactcttcctaaaacaggggatgacgatgctggactattaaacctactaagacttataggactcgttttaattttaggcgtatttttagcagtcggaagtaaaaaattaagataagcataacgtagattaaaacaccgccgcagattgttgtggtggtgttttaactaatatatccgacattagaaatacccattttggaaaagatgtatgatatttattgtaaagaatttcacaaaggaagaggcgattctttgttagagaaaaagtatcaaatccatttacaaaatcattacgatgcaacaagtaggcaagtgcaaaagaaagaaataaaagtcttaaaaaaacgcaaaaatttattaattggggaagttttcccatatcaaatttgtttagaaagcacgatggaatattcaagatttatgctatggtttgaaaaagaagtccaaaaaatcgtgaaagaactttggaatcaacattttattatcaaactaacattatcccaattacatttccgcgaaacgattctgtttttagagcatttaaaagattttagtaaacggataacgattgaatttatcggtgaagacacaccagaaataaaaaaacacttctctgtccaagaacaagaagcattttttatagggaaactaagaatgctgaaaaaatggaaattcattatttctaaacatatcgaaggctgctcagtggaacaaacccttgcttttaccccgtgtctacatgaaataaaatacacgatgagccagcaagcacgaatggaagaaaatattatcgatttgcacatgttcatcgatttttgggaatactgggcaatacataaaaaattgaaattcgtagtcgaagtgaaagaagcggattttattacgaagtctttgatgcataaaaaggtccacgtacagtttgagaatgcatagcggatgaagtggacccgagagtttactattaattaataatgttaagctatagaaaaagggggaaatcattttttctatagctttttgattgtacattttttgctaataagtaatctacgttatcaacctgtaaagtagatatagaaaaaaccttatcattcgggcactgccactaaaaaatgagaataagataaaaacaccttcgttggattcatgtaaaatgaaactaacggaggtgtttctatgagtacaagagtaatgtatccagcagaaataaaagaaaaagctatcaaaatgaaattagcaggtaaatctaccaaagaaattatgagaacattaaacatcaaaaatccaacacaagtgaaaacttggtggcgctggtatcgaaatgaagaaacccacaggtttcaccaaggagtaggtaaacaatataaataccaaaaaggggtgcctgaattaccagaaatagaacaattaaaaatagctcttcggcaaaaagagctagaactggaaattttaaaaaagtacaaggcattggaaaggaagtgaatccagcatattttgttttgttagtagaagagctaaaaacaaagtatcttgtcaaagatatctgtcagatactacaagtacctttatctacctattatcgctggaaaaagaaagatttctcacagagctcattggagaaaaaaatagggcagttatgtaaagcatatcagttcacttatggttatcgaaaaatcgccgcattaatgaaacaagaagaacaagttggcatcaataaagtacagcgtattatgcaaaaatatcagtggcaatgtcaggtaaaagtaaaaaagaaaaatcgaccaggctccgcctactatcagacagaaaaccacttaaatcgaaactttcaagctagtcagccgctggaaaaattaactaccgatatcacctacctttatttcggagactgccgtttatatttatcaagcattatggatttgtataatggagaaatcgttgcctactccattggcgaaaaacaagacacagaattagtgctagatacattaaatcagttgtcccttccagaaggaagtttacttcatagcgatcaaggttcggtgtacacatcttatgaatattatcagtgctgtaaaaagaaaaacgttatccgcagtatgtcccgaaaagggacacccgcagacaacgctcccatagaatgtttccattcctcgctaaagtgcgaaacattctaccataaaacagcgtataaatacgctaaatctattgtaatccaaatcgtaaaagattacattaaatattataacgaaaaacgaattcaacaaaaattaggctaccaatctcctattaatttcaggaaacaagcagcctaatttaaagggtttttatttcattctcatttttccatgtcagtgcattcgtgataaggtttttaatcactattagactgtttttttctttcgtttaatgaaaaatagaataccgaagcttaaacaaacaattccagctaatgacaaacttaagctagtaatatcacctgtttttggcaactgcttttcgactactttcacaggttgtttgtccgtacttttcccactgttaacatctgtaccatctttatcgtttcccggactttgctcgttgttaacatctgtatcatctttatcttttggtggagtaggagcgacaggattatcttcacttggttctgctgtcacatatacaatgacgtctttcgtaacatctgatcctgcaacgcttagagttacaacgtatttaccaggtgtttggaagtctactacgtcagcgaaattgctagtgatggtttctgttgctggagttacgcttgcatggatatctgcaaggaaggctgcttctgtttttgtagtgccttctttgtaactgatctcgtcatcactagaaatactgatagtttctttgccagtatatggcacagtaactcttccggaaaatctaccataatcttcattttcaaaggtgtaacttacttcaccgttatctggtaaattttcccacgtaatcgttctagtagctgcatcataaattccgccgttatctggtttgatgatggaaacaatattaccatccttatctaacaggtctgtcggaacagcgtatacaagtgtattattttgtgtggtttgggttgggcttactaatgtttgatccattgcttggtaatcatcattatcgtcagtaaaataatctggtaaagaactaacatcttttaactggttattattacatcttaccttcgctatagtctctccaacagctagattcgttagttgattattattacaaaataaaattaataaatttacgttttttctaacatctaaatctgtaagttgattgtcatcgcaatataaaatctctaaagctagattttgggtagtatctaaattcgttagttgattgttttcacaagataactcttttaaagataaagcttgattaatatctatattttttaactcattgttatcacaagccaaattttctagcgcttgattttggctaacgtctaaattggttaactggttatcagaacaaaccaaagtgcctaaattcggattttggctaacatctaaatctgtaagttgatttttagtacagccaagatttgttaaagctggatttttactaacatctaaattggttaactgattaacatcacaagccaaataacgtaaagcggagtttttactaacatctagctttgttaactgatttctagggcaatacaaatactctaaagctgtattttggctaacatctagttgtgttaactcattgttttcacaagtcaattcttctaaagcaagatttttactaacatctaaattcgctaacgggttgttagagcaagtcaattcttttagatttagattcttactgacatctatactttttagttgattatcctcaagattaagtacctctaatccagtcaaatattcgatcccagtgctatcttctataccttggcttcgtgcatctagtttagttactttagctaattcctccacagttacagattcatccgcgtttttgttcattgtttctgctacctctttagctaaattatcatctgggaagtagtcattataagttttggttcctgcttggacaagttgatttttcaggttgttattcggtgttttttctttcggtgtttcttttaaatctgtttttagtaattgattttcggttttcatttcatttgcggttgtgctctctgcttttaccattggtatcggtaagctgcttgttacggtggcacttaatacaattattgttaaaattttggacagtttcatatttagttactccttcagctgctattgtctttagcccattcagttatattcaaacaaagtatatattagcatgtgaagattagattttatatagaaatcgcaaaaaaagtataaaacaacggttaattagtgtcgaaattgttacgagttaggttggattctaatttttgaacaatacttaaaatagcaaattcgtggataagtggctctatatctttgttttaatcgttttttgatattaaaaatcaatcggaagatttgtctctgtggagtataattttataaatgatagataagaatttcacttatttctatatgaacaagttataataatagtataaatttgttgtgatgttgcatatacttgatttttgcgtactcatttaagacgaatacaaggtcgaaaaacttcttcttcatgtacttgatcaacaagtagaaatcataaaaaacatgatataatttgaagactatctagcaaaggagttccctattgtgatttattatatttgtgcattatatacattcattagtgcgttagtcagttttggcttttctttggatgcacttttaaaatctagaaaagtaaatggtgatgcattaataaatgcaaaatatgcggtatcaagaagtttatcattacttatagttgcattaggattgtttatattcaagtcagatgctttcttagtcgcattatctttagtaatgattggagcacaactttttgacgggattatcggaataaaaataagtacttttaaaacagttggtccacttttaactgcggtagggaatgtgattatgttaatattattcctaacgatctgatgcttcgtgctgtgcggttgttttaattggcagtaaatgacgtggtagctacaaaccaaaatatagtaggcatcattacttcatacaattattttttataactctacaaattagcttttacagattgtgtaaaatgatacctgaaacgtaaagaagagaagatgatgattcgtcttcttttttttgagcttattttgcttatcaatttaacaaaaaattgataagttttttgtctattatttcctcaaagacaaaggatagtctaataatataacttcctctgtaagttaataagcgaaaccgaaaaatagacacattttccgggtggtttagtacttattcggactatctaactatttctaacatcatataattagtagagtgattttttattcaaataaattaaaagatagaatagagggaaagtcttgaaaaagaaatttagtatagttattatcagtgtattgttacttggttatttagcgccttttgatactttgttagtaggtgcagatgaaacaacggtttctgaagatacagcagttaaaacggcagaagcagatagtgctactgaaggcatagaaagcgaaacaggttcagatgatgaaacggcagaagagccaaaagaagcaaaagaggcagaagcaagcaaagaaacgacagaaaaagaggaaaaagcgaaaacggaagaaccggcttctaatattaaaacggagattaatacagataaaagccagctgaaacaaactagcttaaaagcagcggtgccagcaggaagtacatataattctttgtttccagacgacaatcttgctaaaaaattagctgtgattatcacaggaaatgcggctgcaacaggtaatgaatcagtggatagtgcagctcttttagcaataagccaacttgatttgagtggggaaacgggcaatgacccaacggatatttccaatattgaaggattacaatatttagagaatttaacaagcctgaatttaagtgagaataatatatccgacttggctccacttaaagatttggtaaacctggtttcacttaacctttcttccaatcgaacattagtaaatctttcaggggtggaggatttagttaatttgcaagaacttaatgtctctgcaaataaggcgttagaagatatttcacaagttgcatcgttgccagtgttaaaagaaattagcgcgcaaggctgtaatattaaaaccttggaattaaagaatccggctggtgctgttttgccagaactagaaacattttatttgcaagaaaatgatttaaccaacttaacttcattagcgaaacttccaaaattaaaaaatctctatattaaagggaatgcttctttaaaaagtttagagacattgaacggggcgacgaagctccaattgattgatgcgagtaactgtaccgatttagaaacgcttggagatattagcgggctttcggaactcgaaatgattcaattaagtggttgtagtaaactgaaagaaatcacaagcttgaagaacttgcctaatctggtgaatattacggcggatagctgtgcaattgaagatttaggaacactgaataatttaccaaaattacagacattagttctttcagacaatgaaaatttaaccaatattactgcaattaccgatttaccacaattaaaaacattaactttggatggctgtggaattacatctattggaacgcttgataaccttcctaaattagaaaaattagatcttaaggaaaatcaaataactagtataagtgaaataaccgacttaccgcgattaagctatttagatgtaagtgtaaataatcttacaaccataggggacttgaaaaaattacctctattagaatggctgaatgttagttcgaatagattatcagatgtgagtacactaacaaatttcccgagtttaaattatattaatatatcaaataatgtcattagaacagtcggtaaaatgactgaattaccttcgcttaaggaattttacgctcaaaataacagtatatcagatatttcgatgattcacgatatgccgaatttaagaaaagtggatgcgagtaacaacctaattacaaatataggtacctttgataatttaccaaaattgcaaagtctagatgtgcattcaaatagaattacaagtacatcagttatacatgatttaccaagcttggagacgtttaatgcgcaaactaatttgattaccaatattggtacgatggataatttaccagatttaacctacgtaaacttatctttcaacagaataccgtcgcttgctccaattggtgacctacccaatttagaaacattaatagtatcagataataattcttatttaagaagcctaggaacgatggacggtgttcctaaactgagaattttagatttacaaaacaattaccttaattacactggaacagaaggaaacctaagttcattaagtgatttaacaaatctaacggaattaaatttgcgaaataatgtttatattgatgatataagtggactttccacgctatcaagactgatctacttgaatttagattccaataaaattgaagatatttctgcattgtctaatttaacgaatcttcaagagttaacacttgaaaacaacaagattgaaaacatttcagcacttagtgatttggaaaatttaaacaagctagttgtatcaaaaaataaaattattgatattagtcctgtcgctaatatggttaatcgaggggcaattgtaactgcgagtaatcaaacatatacattgccaactgtattatcatatcaaagctcgtttaccatagataatccggttatttggtatgacggcacactactagcgccatcatccataggaaactctggtaattacaaggacgggaaaataacttggactaatatgaccgctacgtctagttccactttatttaactttaataggttaaaagacggtttaaccttctcaggaacagtcacccaaccttataaatctgcagccaaagtaactgcagatgcagagcaaacttatacaattggtgatactatttcagaggagcagtttttaaaagatgttaatgcaaaatcatcagacggggcacctgttacaagtgattttgctacagtggtggatttaaacacttttggcgaatatgaagttactttaacttccgaaaaagatggaatccaaggggatagttgcaaagtaattgtcaaagttcttcacggagcgcctgtcatttcggcagaccaaacaattagttatgataaacatgcaactattacagagaaacaatttttagaagatattcatgccagcacagacttggatacagctattacaaccaattttagtacagcagttaacttgaataaaggcggagattatacagttgcactaaactctgaaaatgaggacggcgtgaaagctgaaacggtttatgtcactgttactgtaaataaagacccagcgccgattataagtgctaagacagaaatcacgtatgataaattctcgaaaaaaaccgaagcggcgttcttagatgatatagacgcagatacaaatgatggctctatagtaacttctaattttgctacagcagttaatttagataaagctggtgattatactgttacactgaattctattaatagtgatggtgtagcgggcacgccaacagcgattattgtgcatgtggagaaagagaaaatagcaacaattagcacaaatacggcacaacaatatgaaaaatatgcgaagattaatgaaacgcaatttctaaaagatgttcatgctagtattaacgcgagcccaacaaccgcagttttggaaagtgattttgaaacagtagttaaactagacgtcccaggaacgtacacagtaacgattactgctacaaatgaagatggcggagtatcggcacctaaagaagtttctgtcatagtaaggaaaattccagcaccagagatcactgcagataaggaaataacttatccgaaatttgatgaagtaagtgaagcagaatttttaaatgatattcatgcaactattagtgacaaaaatgtagcgattacaagtaacttcagcacagatgtgaatttaaataaagctggcgattacacagtaacattaaatgctacgaatgaagacggcgtaaaggctacaccggttgaagtaattgtacatgttcaacaaggagaacgccctgttataacagccgatgcaactatttcctatgacaagttcgctaacataacggaagcgaagttcttagaagatattcatgcaacaagtagtgatggtcaaagctctactgtaatcacctctaatttccagaccgcgacaaacttcaaaacagccatgagctacacagttacgcttaatgctgtaaatgaagacggcattagcgcagaaccagtagcagtgaccgttacaataaataaagaaccagccgcggcgttaaaagctgatgcagaagtaagctatgcgaaaaatgaagctgtaaccgaatccgatttcttcaaagatgttcatttagaaggaacggaagcgccaagtacagccaaagcaacaagtaattttgattccgtagtagatagaagtaaaacaggagattatactgttacgataaatgctacaaacgaagatggggctgtttctacaccaattgaagtaattgttcatattgaagcagaaagtgcaccagtaattacagcgaatgcagaagtaaaatataacaaacatgaacaaacagacgaaagaagatttttatatgatagtgaagcaaaaatcgatgaagctaatgtggaaattaaaaccgattttgcagaaaaagtagatattaataaagttggaacttatactgtcacactgactgctacgaatgaagatggccaagctgccaatccagtagaagtgagcgtcattgttagtgatgccgctgctgaaaaagtaaatgtgaaatatgtagatgaaaatggatcagaaattagtgcagcggagaccttaactggtaatttagatgaaacattttctattgatgcgaaatctatagctggatacaaatgtgatgcgactttaagcggtgtattttcaacagttgagcagacagttgtgttccattataaagcaatcaagcctggtgttgtaacgattaaatacgaagatacgaatggaaaagcagttgacgaagataaacaaatcactggcgaagtaggggatgattttgaagctgaggcgcaaacggtgagtggttattcatgccgagcaattgcaagcggtaagataacagaagaaccgcaaactattactttcacatacagtacagcaactccttcaaaaaaatcaggcgaaataacagttcagtatgtagatgagtcaggtaagaaattagctgattctaaaaaggttacagggaacattgatgatagttatagtgtagaagcaaaagcaattgaaggctatagcgtagttggcgatgattctgctaaaggtgtttttaccgaaaaatcgcaaacagttacttttaaatacaaaaaaaatacacaagttagtaaagatgaccctaaagttaaagggaaaacaaatcaaccatcaagtactgatacgaagctaaaagtagacaataattcgttgcctgcaaccggagatactgaaaatatgatattagcagttttaatcggttttaatatgctaatcgttgctagtatattcctttttagaaaaccaaaaacgaaccaataaatggataaactttaaataatagaagccttatagaattcattaaataatgatattttataaggcttttattacttagtgaaacaaatttaacaggaattactgaggaaaagcttcttctaatttctaatgtgaattataaaacattcattaaatgctcacaaaacaagttgttttaaatgttataataagttggaagtgtatatgagtggtttttgtagagaggggcaggaagataatgaataaaataattatttattcaagtcaatacggcaccagtaaacagtatgcaacagagcttagtcagaagaaagctattccaatgtattctgtggaatctattcctgaatcaatcgttgaagccgatgaaatcatttatgttggttcaatctatatgggaaaagtacttggatttgataagttttctaaaaagtataaaactttgtcgagtaaattaatcgttatttcagctggaatgtatgatccaacacgcaaggaaaatacggataacatcgaattaacggtcaaagaaaaccttcaaaaaactaattttttattaaaagatatattttgtttgaaaggaaaactagatacacagcaactccgcttgaaacataaaatattagtcaatgctttgtataaaagcgcgaaaagaaaaaaagagagtgacttaaatgataatgaaagagatatagttcgtgcttatgaagacgattcgcagattgatttgaataagttagatggtgttttagatagattgtaactgacaaccataagtaaaatagccaaaaagcctgtccattaaagagaggcttttttagtattgacttagttagaagacgaaatgttaattttttcacttaaaaagcttattttaagctctttttcattgaattgtttcacagaatgctcacaaaagagatgtgctaccggtgctataatgagggggaaggatatacatagagaggaagcatgcagatgagagaaataaaagtcgatgaaaggaccttccaacaacacgcaaccaaattggcaagtgaaagtactggaagttatttgccgctgaaaaacgggaatatggcatattccaaagccaattcgattgatcaattgcgctcggctttgattgagttggtggatgtcgtggaagatttccaacatgtgaccaaaaaagatgcgagccggcttaagaaaatgggtattgcttatgctaaacaagaccagttgatgggacaaaaaatcaatcagttggaggtgcgttaaatggatagcgcacatagtcagcttgaacaacaactccaacaaattaaaaaagcgaaaataacggcagaaacagatgctgaccaaacgagaagaaaacaaaatgaacaagattggctagaagaggacagcaaccaattaacacaagaaaaacgggtgttattagactttttacgcagtggctggcaaggcgaagaagccagtagttttcatcgttatttagaggagcagcaacacgaagaatctcaggtttggaggcgtgatctccaggataaaagaagcgatttagacacggaattacaagaaaataaggacaggctccacacgttagaagccaaacaagccaccttgcaaaaggagtggagtcaatgagccggatagatattgccgaattgaatgactttctccacggtttgcgaagtagtaatgcggaagctaaagcgatgattagaaagataaaagaagcggcaatggattatgcccaagacaaccgtttaaaaggggaagcagttagtacctccaaacagtatttttctagcacctatacaagtatttgccagagcatcatcgaggcattggatgagagtgaggagcgactggcgcaatatattcgcgagttcggaagccaggtggatagttcgccttccgctagaattgatgcagaaatcttacaagaagcgatggcgaaagtgagccagttgcagcgaaaagaagaagatttgcaccggcaattgacggcaccgaacacgaagccagatatgcaacaagtttatgcagtgaaatcaagaagcgttcatacccaattgctgaaagccatcgaacaagagaacatcctagaaaaatatttagctttcgaacaaagtcatggccagttttttagtgcattagatgaacttattcgagcaaccgcacgtgcggtacaagaattgctacatcatgtgagttttaatgacaaaacagggacttattctgtgccgaaaagtgcggcaaacagcttattgcttatgaaaaaagcacgagataaagcacgaaaagaaaacgacaaagatccgtatccgaaagcttttgaagattacaccgtgttagcttatacttatgtcaatgatcaaggtgaaaccgtgacgatgtggctacttgaaaaagatggaaaacgggtagaaaacaaggagttgcaagatttcttagaaaaacatggtcaggaattagacccacttctttatacaaacctttctggagaagaactcgaacgaaaagtgaatgattcttggaaagagggtatcaactatttaaatggtcaaaaagtatctggagtttctggagccacactaagatcatccgcttatgtggctagtatgaaagattggacagacgatgctgggttgacggatatggcattaggtttaggatttgggattgcagcagctagaaataagcctgtgattaaagaaaaattaaatcctgccgaaacgaagcaaacggtaaatggtgagaaatggaataattattttaaagaaaaatatggtgcggggaatgttcaatggaagcctagttcatttgaggatattataataaatccagaaagattgtatggaagtacaaaaaaagaagttaggcagatgttgggagaagggtggaaagaggaaacatatggatctgcaggtaatggttggaaattcactaatgaaggagatggaatggtgttttaccaccctggagagggaatacacaaaggttcctattatggattctcatcaggagacactggtaaagtaaaaattgttggaaaagattatatagatttttcaaaagataaagcaacaattataaaatttggtggtgaataaaatttgaaaaagttaactgtaggtggaaagtttgattggtacatagatactttagaaaaaagtggtatgttcattttggaattatctaatgaagaaatagaaacgttcatttttgaagacttcatagttggagttacctctttttttagtaaaaacaatttgagtgaactgaaggcaaatgaaataattgatgaagatatggaaaaaaatgcttatcttcttagagaaaaagtactaaaaattgataatacggatttgtggaatattaatagcgtaagacaaagttcagagtggctagatatatttagaaggtctgatgaattgaagcgtcaacttaaggaaagatggtctgatgaagaaatagagtatttgaaaacattataatgattatatgttaataaatgaaataacttaaaaattaacaacagaacaatctttccaataatagctgtttctctaaatattttatgtatgtatacaattaatttacctgaggaagaaattgagtgtaaatataattgattatatagcatcttcttttcgagcgtagattgttagttaaagttttgcaaaatcgtttggaacagggaaaagaaggcatatacaaagatacttcattcacattttgaaataaaaaacatagaaaggagaaaatcatatggtttcacgtaaacaatcaatccaaaaaactcaactttctaaaacaaaaaaacaaaccctaaatgtaaccatagatcgccctataggttataccgacaaattcggcaatgtctatccgctgaattatggatttgtggaaggcgtcattggtggtgacggggaagaacaggatgtgtatgttttatcgagaaagatttctgagccaattgatacgtttcaaggagatttaattgcggtgattacccgaaatgatgatgtggaagataaatgggtagtcgcagccccgaatgagaatttcaccatagaggaaattagagagaaagtccatttcattgagcaatattttgattcggaaattaaattgatttaggtgaaaatgaatatgcaaccaccgaaaaaggaggcggaaaaaatggatgaaagatttgaaaaaatttatacacaagggaaactcaacattatggaaatttgggttgataaagaaaccggtgtgcaatatgtttaccattttgctggttatgcgggtgggatgtcgccgcttttggacgtagatgggaaaccgttacttgcagatttatctaaacttaatggcgctgagtaaaacgataagttgatttatggtacttttacaagctagacaaataaaaacaggaattctctatttggatgtagaggattcctgttttttacagttcattttaattgcttggaaattgattggtcacatttaaagtgttcattccgccccaaaagccttttgaaagagcgattttctctatctcttttaatacgtttgcttcctcaggatttaaatggattttttcgacgaagcataaggtatggatattttgaaagacagaacgagcttctaattcgactgtttgagaggcttttctgactctgatggtagctgtagtcaaaatttcttgtagtcgggacgaattttggttatttaaagaagtatccgtctcaaataaattcttcaattcctcgaataaatctataagcgcctctggagtattctttttcattaaaacgcacctcttttaataaagtatcttactatagaatactcctttttgataattgaatccacctacaactgtttcaacgcaagctccgtcaaattctccacagtaaatccaaatcgctctgccagctcgtctcccgggccagacattccgaatgaatcaatcgcgaggatttcacctgagtcaccgaggtatttatgccagccgtacgatgcgcccatttcagcggcgaagcgttttttcactgcttttggcaaaatggactctttgtattcggggctttgtttgtcgaataaatcaaagcttggcatgctgactacgcgtgcgccgaagccttttttagcgagattatctctgacagctgtcattaggtgcacttcggatccggaagcgagtaggatgatatctagcttgtccagcggggaatcggctaagatgtaggcaccttttgcaagtccggttttcgcttttgctgcgctgtttggtaaaattggcaggttttggcggctgaggactagcatggttggttgttctttttgagtaaaggcaaagcggtatgcttcgacggtttcgttgccgtcagctggtcggattacgtgaagtcccggcatggcgcggaaggatgcgagatgctcgattggttcgtgtgttggaccgtcttcaccaaccgcgatggaatcatgggtcataatgaaggtggatggaatgcccattaaggctgccgaacgaatcgcggaacgtagataatccgagaaaacgaagaaagtcgcgccgaatgcttgaactccgccatgaagcgtcattccgttgactgctgctcccatcgcgaattcgcggacgccgaacgagatatttttggccgcgtaattacctggagcgaaccgttcgctagcttttaaatgggttttattggaggaagctaaatcagctgcgccaccaaataagttaggcaattttttctccaattcttgaagaataatccccgatacttcacgagtcgcaactggtttatctgcattttcatcgaagacaggaagttctgcgtcccaatcagctgtcaaattatcgtccattaggtgttgcaagctttctgctagtgctggatatttttgtttgtaagcattgaatgtccggagccagctgctttcactcgcgcgacctttggaatgataaaattctttttggttttcgacggttttcggtaattcaaaaggtggcatttgccagtcgtaagcttcttttgcaagcttgagttccttttcaccaagtggggatccgtgagccgccgattttccggcttttccagggctaccataaccaatcactgtcttcacttcaatcaaagttgggcgggatttttccgtttttgcaagatggattgctgcatcaagcgcatctaagtcgtttccgtcgtccacacgtagcgtttgccaaccagcagctcggaatctgagttcgatgtcttctgaaaatgactcgtttaaatcgccatcaagtgaaatatcgtttgaatcatataaaacaactaattttcccagttttaaatggccggcaagggatgcggcttcataggaaataccttccatcaagcagccgtctccgcatagcacgtaggtgttatgatcgacaacagggaattcaggttggttaaatttggcaccaaggtgagcctcggccattgccatcccaactcccattgcgaaaccttgaccaagcggaccagtagttgcatccacaccaaccgtatgaccaaattcaggatgaccgggcgttttactgccagtttggcggaagtttttcagctcgctcattggtaaatcataaccaaatagatggagcaaactataaagcattgctgaaccgtgaccagctgacagaacgaagcgatcgcggttaaaccaagttggatgttctggattgaattttaaatgatttttccaaagtgagaaagccattggtgcggctcccatcggtaaaccgggatgtccggagttcgctttttcaatcatatccattgataatacacgaatcgagttaaccatttgttcatcaattctgctcatattaattgccttctttctgactgaacgcttcccaatcttttaaaaatccttcaatacctttatcagtcaaaggatgagaccaaagtttcgggaaaaggcttcctgggatagtcgcgatgtgtgctccggcttcagcggcttcttctaagtgcccgatgtgacggatgcttgctgaaatgatttctgcttttagaccataattatcaagcacttttttcaagtttttaattaaaatcattccgtctgtaccaatatcatctagtcttcctaagaacgggctaatataagtcgcgccagcttttgcagccattaatccttgggaaacagtgaaaataagcgtaacatttgttttaatgccttcagctgtgagggtatggactgcttttaaaccttcttccgtcataggaatttttactactacatttggcgcccattttgctagaattcgagcttcttctaccattttgtctgcttcgaggccgataacttctgcgctaaccgggccgtctacgatagaacaaatttctttgattacttcttcaaatggtcgaccttcttttgcgatgatggttgggttggttgttacaccgtccactaaaccaagttcgctaattcgttttatttccgatacgcttgctgtgtccaagaaaaatttcattatttactcgctccattctctcagctgaactttaaagctgaatactttatttaatcgtataaccgccgtcgataatgaggttttcaccagtaataaggctcgctgcgtcgcttactaaaaagagggcgcatgcggcaacttcttctggataaccaaatctcccggctggaattaattttttcatatcttcgccgacttgacctgcccaagcttttttgccaagttccgtcaagataacagttggggaaatcgcattaacattaatgttgtaaggcgcccattccattgctaatacttgggtcatagaaacaatcgctgctttactagcacagtaggcaacgtgtttatcaagtgcgatgacagaagcttgagaggccatattaacgatttttccgccgccagttgcaatcatttcgcgaccgataatttgtgccattaggaacgaaccttttaagttaagctccattgttttatcccagtattcttctggtaaatcttctgctttttcgagaagtgcgacaccagctgaattggctaaaatatcgatttttggatagacttttttgatttcggcaacgactttttcgatgttttctttcttagtgatatcgacttggagtgcgagtgttcttgatgggttgatttttgctgcgacatcttttacatcttctttaatatcaagtaagacaacataagcgcccttttcggaaaaaagttctgccattgctttaccaatcccgcttgctgccccagttaccacggctactttgtctgtaatgttaaaatctttatcaaagcctttaaaagtcatttttcattacctccaataaattttttatctatttttttggtcgatttcttccattaaatctacttttgcttgggagcgtccgcccgaaaagtcactatcaagccatgtatcaagtagagatacggcgagggatggcccaattactagggcgcccatggtcataatatgtgcgtcgttactttttcttgcacgttctgctgaatacgaatcatgaatttgtgctgcgcgaatgccgtgaattttgtttgctgtaatggccattccaatacctgtaccgcaaatgagaatcccccggtcgtaatcattatttttcacttctagcgctactttttcggcaatgcttggataaagtactttttcatcttcaaaactgccgaaatcagtaaactcgatatttttctcctttaaacgtgtgatcagggtttgttttagttcgtaacccatttcgtcacaaccaattgcgattttcatactatctcatcctttcgttttgctaacaatagaaacaatgtcggcaaaattttgcggtttatggccaaatcttccgacgaataaaccatcgacatttttttgacggacaatttctgcggcgttttctttgctgaccgagccgccgtaaataattcttacgagcgtttcatcaccgcctagttcgcgaataatttcacgcaaagcctgatgagcgctttcgatgtagtctgtgtcagcggaatttgccttgccaattgcccattccggttcataagccagaacgacatttttaaattgtgttacttgaatagtgtcaaatagcgcttcgatttgttttttaagcgcattttttaattcgttcgtatcatttgcgcgaatgccttcacccacacatactacaggagtgattttttcatccagcgcgagttggattttctttgctatctcactagttttctcatgaaaaaggtttttgcgttctgcgtgaccaatttcgacatagttcgcgcttaaatcaatgattgattctaccgaaaattcaccagttagcgggccggatttctccggcgccatattttgtggaccaaaaccaaatgatgtccccgctaaaaggttggcagtcgtttcgagtgtgcccatagaaggaaagataaacgtatccacatcagaaaaatttccaagaagagggatagtcgcttctaaccattcagatgtctgagcccgagtattgatatagtttttcatattaattccaactaagggtttacgcataaatcagaccgccttttttaaattttctaaaatgatattcattaacatccaagacgattcagagccaggatcaagatgtcctattgctcgttcgccaagtcttagtgcgcgacctttcttagcaataagtgggatagtagactgagcgccagcatgcatagcatctacaaatgtggaaaaagtttcgattggctccgcatttgcatcacgattttgaagcacttccacgccgggcaaaaatgcgtccatcatcgttttatcaccaagttcggcttttccgcgatgttgaaccgcagcggccccatttataatcatgccgcaaagctcgtcgaagttaacctccgttttcccaggaatatcagcgccacatttcataaagaaactgccgtaaagtgggccagatgcgccaccaacttttccaaggagaatcattccggattttttaagcaacgttgcaatatcgggagaaacagctagtaattcatctaattgtttattcacttcacgaaagccgatgctgagattgattccgtggtcgccgtctccaatatccgaatccagtccggtcaagtaatcacgttctttttcaattagcgcccccatgtcctgtaaaacgtggccgaaaaaagcgctatccataactaattcgctcatttttattcctccagtagtaatttagtccactttgaaatatggtgtgtcacaaggtgtatctaaaaggtctttcagttcatcgtctaaacgaaccagtgtaatcgacataccaatcatatccatcgaagtcgcgtagttcccaacaagtgggttatgaatatgcacgcctttttctttcaaaatttcatccacacggcgataacaaatgtattgatccatcactggtaaaccaccaagtccattaataagtacatgtacttcttcgtcactagttaatttcatttcttctataagatagcccatgatttggtcgactactttatcagctggttcgatggaagtacgtttgataccaggctcaccgtgaatccccatgccaacttccatttcgccttctttcatttcgaaaatagctttaccggttacaggaagggtagaagaagaaagcgccacacccatcgagaacgtattagcatttgctttttcagcagcttgttttaccgcatctaggtcaagtccttttgctgctgcagacgccgctgctttaaatacgattaagtcaccagccacaccacgacgatcttctaccttttctgctgaataaatatcatctgttacaagcactgtttcaacgcgaatgccgtcgtccgcagccatttcagcgcccatatcaaagttcattacatcgccagcatagttcccgtacatatatagacaacctttgccactatcaacagcttttaccgcgttataacaaggttctggagaaggggatgtattaatgttaccgactaccgccgcatccgcgaaatccttccctacataaccaaggaaaagtggctcatgaccagaaccgccaccaacaataatccggacacgaggttcttcgctcatttgtttgcttacgattactcgcttatcattttctgcaaaatctacgtatttcccttgtgccgcaacataaccagctaacatttcttctactgcttcatacccatcattcactaaacgtctcatttttcttcctccttcatatttttataagaatagtgatagtaaaaatccgccaaccacgccgccaacaacagctgctgccaaattgactatcgatttagaaaattttccgcctgttaaaagggaagctgtgaatacaccaataccagctgcaaccgccatgtctacccaaactgttccagattgatagatcattgattttggaataccatgattaattgtccaaactgtcccaacgataaacgctgctgccatccaacctccgatagcgccccattcatcaaccatttttccccacatcattcgaatagcaaaagggaataaaaagccacctgcaatcgttgctaatgcaataccaatgctcattatttacactcctttttagactaattgattttcgtttaaacgctcttcttctttcatattcatgccaggttctgttttttcttgttttgcttcttgtttttttgccatatctttttcaattgctgctgccacgattccagctagaactgctccaatcgcaacaagaccaatcgttggaagcgaacttactaactcgccaccaccttgcataaagacatcacgcataattccgcaaatcccaattccgacagccatatcaacaaacgctgcgtcttcatcattttcgattaaaccaacatagtgattcataaaccacattggaccgataataatgaaagctgccaaataacctccaaaaataccataattctcggcaagtggagtccaaacactcataacaatcatacctgcgatacaaaaaccaatcattcctctaaagaatttcataataaactcctttcgaaaatagtattgtcatgtaaaaatgaatttacatagttcccagttacaaaattgcgttttattacgtttttaatgcacatttgtgagttcttgtaagatagcttctttggatggattaacgagagattgaacagcagcagtaaatgcgccttcaactaatggggcatcaattatcgttgttttttcaagtaagtcagtgtctaataattcgagtgctgtttcggcacttaagatagcgcttccaatatcgcaaaaaatatatatatgttctgaattagtgcaagtcgcgatattatcggctatcatgattgcgtttgtcccaagacgtccgtcaccagttccgccagaagaaataatatgtactgtatctccaaccatttcgacaatcatttcctggaggccttctgtgattttttgactgtgagatactaaaacaatacttatcatttggttgctcctttctgttttaaattgtgtttatttgctatttatatcctaacatacttgttttttattgtaaagtgttatcttttgttgttttttataaaatatatttgtgttttgttatttttttgggtaatatgtatatacataaagaaatcaatgataggtaaaaggagggcgagcagatgtttccatttgaaagacaaaacaaaataattcatctactagaccaaaatagcaaaataactgtaccagaattaagtcgtatcttggatgtctcgattagtaccatccgaaatgatttatcttcattagaagaaagcgggatgattaaaaaagtacacgggggtgcggtacttttaaaaagcgaagaaaaatttactaattttaatgaccggattattcgcaacatcgaagaaaaagaagcgattgcgaaagaagcggcgactttagtgaaaaataaccaaacaattatccttgatgccagctctacagcacttgcgcttgcaaaagaattacatggattttcaaggctgactgtcattacaagtggactctacacagcaatcgaactaaaagacaacccgaatattagcgttattttaacgggcgggattgtaacgacgaactctttcacactggaagggattcttggcgcaaatttaattgaaaatattcacgccgatttatgttttatgtcagcgaaaggttttacaatggaagaaggcttaactgatttcaacatttatgaaacagaactaaaacgacttcttgctaaacgaaccaacaaattgatcgcacttctggaccatacaaaaatgggcgtaatttccactgcgagcatcacctcggcagaaaatattgatttacttattacagataacaaaataaataaagctttatataaaaaattccaagatgcgggacttccggtcaaagtggcagaataaaatagaaaataaactctttgagcgaaaagtggttcaaagagttttttttgataggagaaatgagtatggattatgttataacaaccgaattgcctagtgcagaggagtttgttcaacttcgagtggacgctggacttagttttcgagctattgaggcgtcaagaaaggcacttttaaaaagtgtatattttgtaggattacgttcaaaagaaaatggtaaactgattggaatggggcgactcgttggtgacggtattatgtttattgtttctgatattgcagtttttccgtcatttcaaggtaaaggctttggaaaggtaatcatgacacatattaaagattatattgaagcaaatcttgataaaactgcgtgtgtaacacttctcgccgatgttccagctcatgggctctacaaacaatttggctttcgggaatctgcgccagcttctattgggatgatttatcaagtaggaaattaaaaacaagccatctgcaataatgcggatggcttgtttttatattatttatttctttaattctcgttccatttgtaaacgttgtactttcattgttgcggtacgaggaatttcatcatatttcatcaccattggttcgttcatatgtggtaagtcagaaacagctttccaccatgcatcccaattcatttcgccgtcgttatgaacagcgataattggttgagggctaccattttcaccacggataatgacaacttcatctaagaaagtaagcgtatcaagcagtttatcttcaattgcgagtgtactatcaattgtttctactaaatcgacttgacgatcttgcaagaataatcggcctttttcatctttcataccataatcgccgctatcccaccaaggaccgtacacattctcttcaaaacgagcttcttctttgtaataagtaagtgcgcgacctttggaaagcatttgaatattaccactaactccagccggaacaggattaccatcttggtccacaatccgaacttctgttaaaccgggaacaccaatccccatatcacgcgcatttagtgtttcaattgattgaagcgtatgaccacgtaaaatcatcggaccacattcactttgaccataaatttgtaagaaaagtggttttttatattcagacgtacgaaggaaaaccgccattgtttctttgttaattgcatcaaatgttgaatgataaaatttgatgctttggaatacgtctggtttttcgcgagcaagggatgcccattgaacaaaatggtttggatgcgtttcgagtacgtacggtttatattcacgtagtactttttcgacgtttgctttcgacggattggcaattgggagaagcgggaaaccaagcgacatcaaggacgaaacaccaatattaaaacgagaatgaactggtgagatgtggaaagctacaagccctcttggtttaatgaaattaagaatacggcgttggtattttgttctccaacccatcgaattcgcggagtgggcgattaattttggtacgccggttgttccggaagtatgtgtcatgtaagcaatcatgtcttttggcaattcttcttgttcgcatgtgtagccgtctagtggtgctttaaataattgttcagcattgatcaatcttgagtctggcaaattgtttaactgatgacttttatcagaagtctcagaatcaaaaagtaaccaaggttggtcaagacgattaacgaaaatatcaatagtggatgctggaagatgaggggacaccatgattggtaccgcaccaatataagaaatcgcaactgctaaaatataagaatcgaatttggcagatttatacacgattactttttcttctttgcgaactccgaatttatgtaggtgagctgctttttggataatagcctcttcgcattttttgtaagtactgtgaaggcctaattcaggaaaagtaacaagctcttcatcaaaatggataggcatttctgggtagcgttcagcagattttttgaaattggtatagagattaagtggttcgtacttttttatcgtcatatggcgatgctcctttaatatttgatgttgttattatatcactttgtcgaaataatgaggagtagttatggaaaacatttatgccattgtaaaaaaatctgtaaattgctttttttcttactttggaaaattccgctgatgccctgtaaagatatctcaattaatgatataatatgttaatataatcacaaactattggtctagggaaaaattttcgaaaaagtggaggtacaaaaatgaaaaaaaggttagctacaactatcatcatgctactatcgcttgcattaattatcgcaggttgtggcaataacgacacaagtaaaagcgacacggcgaagacaaaagaaaaagaaaaaacagaagtaacatcgggagcatcaaaaactagctatacagatccatctgaattaaaagataaatacgatatcgttattgttggtgcaggtggggcaggaatgtccgcagcactggaagcgaaagcgaaaggtatgaatccagtaattcttgaaaaaatgccacttgcaggcggaaacacgatgaaagcctcttcgggtatgaacgcatctgaaactaaattccaaaaagaagaaggaattaatgatagcaacgataaattttacgaagaaacattaaaaggtggtcacggaacaaacgataaagcaatgcttcgttttttcgtagacaattccgccagcgcgattgactggttggattccatggacattaaattaaacaacttaacaataacaggcggaatgagcgaaaaacgtacgcaccgtcctgaagatggttcagctgttggtaaatacttagtagatggtttactaaaaaatgttcaagaacaaaaaattccagttttcgttaatgcagacgtaaaagaaattacgcaaaaagacggcaaagtaactggtgtgagagtaaaattaaacaataaagacgaaaaaacaattagctcggatgcagtagttgtaacaactggtggctacggagctaataaagatatgattgaaaaagaacgtccagacttaaaaggatatgtaacaacgaaccaagaaggaagtactggcgacggtattaaaatgattgaaaaacttggtggaacaacagtggatatggatcaaatccaagttcacccaactgttcaacaagataaatcttaccttatcggtgaagccgttcgtggtgaaggtgcgattttagtttctcaagaaggaaaacgtttcggaaacgaattagacacacgtgataacgttacagcttccatcaacaaattaccagaaaagtccgcgtacctagtatttgattcaggcgtgaaagaccgcgttaaagctatcgcgcaatatgaagaaatgggctttgttgaagaaggcaaaacaattgatgaattagctggcaaaatcaatgtaccaaaagaagagttaactaaaacattagatacttggaatgcaagcgtgaaaaacaaaaaagacgaagcattcggcagaactactgcaatggataatgatttatctaaagcaccatattacgcaatcaaaatcggcccaggaattcattacacaatgggtggcgtaaaaatcaatacaaatacagaagttttagacaaagacggtaaaccaatcactggcctatttgctgcgggagaagtaactggtggcttgcacggggaaaaccgtattggcggaaactctgtcgctgaaattattattttcggacgtcaagctggcgacaaatcagcagaatttgtaaaagcacagtaagaacccatacaccatagtgatgtgattactagaaaataaaaacttgctaagacgctctaaatagacgttttagcaagtttttttattggctaagtacagcgctagtgtagtactatgaataggagataatactaattttaaattattagtattttaaataaggaggaaataatatgttgaaaatgggttttatcgggaatgggaaaagcacgaatagataccatttaccgtttattttagagcgagataatattgaagtgaaaacgatttataatcgaaatcccaaaacagccacttgggacaaaattgaaggtgttcactatacaacagacttagacgagctgttaaaagacccagaaatccagttaattaccatctctacaacacaaagctctcattttgactatgccaaaatggtgttagaaaatggtaaaaatgtgcttgttgaaaagccatttatgatgacatacgcagaagctaaagaaatatttgagctagctaaagaacgagggttacttgttcaatgctaccaaaatcgtcgttttgattctgatttccttactgcgcaaaaagtgatcgaaagtggaaaattgggtgaacttttggaagtggaaatgcattatgattatttccgtccagaaatcccagaatccgtccatgaatttaaattctacgatagctatctatatggtcatggctgccatacaatcgaccaagtactatcttacttcggtaaaccggacaacattcattatgacgtgcgccaactgctcggcgaaggacgaatgaacgattatttcgaccttgatttatattatggtgtaacaaaagtttctgtaaaatcaagctacttccgtataaaagcccgtccaagctttgtgttatacggcaaaaaaggaacctttacaaaagaaacaaaagaccgccaagaagaacatttaaaactattttacatgccaagcaacccggactttggaatcgatttaccagagcattacggaacgcttacctatgtagatgatgcaggagtttggcacgaagagaaagtaatctctgaggttggcgattatggtcgcgtatacgatgatttatatgaagcgattattaatggcaaaccgaaacaagtgacagatgaagaaaccttgttacaaatggagattttggaaaaaggtgtcgaagcttgtaaataaagaataattgtccgccggagcaatcttgcgggcttttttttggatgaaaatgattgatttcgttcaaataaacaaccaaaacaaccgtaaaaatgaactttttgcataatacacccataatattgaatgaactcgttcagcatgatatagtgtaatcaaacaagtgaagcgcttactttgttgagagaggatgtggattatgaacatatcgaatttaattaatgaagaccgaattatttttgataatcgtattcaaacaaaacaattattatttgaaaaagtggcggaagtactagttaaagaaggttctataactaattcgaaaaaatttatccgtgacttatataatcgagaagaagaaacttccactggaattgaggcgggttttggcattcctcatgcaaaaagtaaatacgtaaaagaaccattgattgtttttgttcattctggtattataattgattattttggactagatgattcaccgattgaatgtagttttataattggcgtcccgaaaaaagcaacagatgttcatttgcaaatcctaagtgaattgtccaggaagttaatgaacgatgaatttcgtgaaaaattaaaaaattcaaaaaatgaaaatgagattaaaacaattttatcgaactaaggaggcgtttcacatgaaaatagttggtgttactgcttgtcccactggtattgctcatacgtatatgtctgctgaaaaattaactataacagcagaagctctaggttacgaagtgaaaatcgagacacaaggtgctaaagttgaaaatgttttaacgaaggaagacatcgccactgctgattatgtcattttagcagtagataaagaaatcgatacatcaaggtttgctggaaagaaaattaaaaaagtatccacttccagagcaattaaagaggctgatgtggttattgatgaaactgtttcaggtaaaggattaatcagtttggaggcaaaaagttcggatgtaagctctgaacaaccttcaaaagcaagtttatataatcactttatgaatggtgttaactatatgttgccatttgtcatagctggtgggattttaatcgccattagttttgcttttgggattgatgcatcaaaccctgactctgactcgtataacgcacttgcagctgcattttctaaaattggtggggatactgctttcgggttaatggttccagcgcttgcagcagggatagcggtttctgtggctggtcgagcaggatttgcgcctggtcttgtcgcggggacactggcaactgttggtggatcaggatttctaggcggtatgattggtggtattttggctggttatgtggcacatttctttgctaataaagtcaatgtcactaaatcacttgcttcgatttatcagttaattgttgtaccgcttttaggaattacgattgttggtttggcaatggtatttatcattgatacaccaatcgcttgggttttaaacgcgctcaccggttggttaaatggtcttggtgagacatccggtgtcgtatttggactactaatcggtgtcatgatggcagcagatatgggaggtccaattaataaatctatttcaaccttttcaattgggttaatgtcagctggcgtaaccgcaccgattgcggcttgtatggcggccggaatggttccaccacttggactagcactcgcaacactattattcaaaaacaaatttacaaaagaagaaaaaacagcggggaattcttgttgggtgttaggtgcatcttatattactgaaggagcaattcctttcgcagttgctgatccgctccgggttatcccgagtttgatgttaggttctgcaacagctgctgcaatttcgatgggagctggtgtaacttcgatggcgcctcacggtggaatttgggtgatgttcattccaaatgtaattaaccatctatttatctacttactagcaattgcagctggtacagtcgtgacagcgatttctgttggactattaaaaaccccattaaataagcgaaaaaataaagaggagatgatataatgttatatacaatgaaagatcttttagcagtaggaaaagaacatcaatttgcggtaccagcatttaatatctgtagttttgatatgttaaaggcgataatggaagaagtggaggctaataatgctcctgtaattctagaaattcatccagatgaaatagaatatctcggtgataactttgttgcaacggtaagagaatacgcatatagaagtaaggtaccggtcgttattcatatggaccacggtggaacaattaaagatgtgatgcgggctattagaaatggctatacttctgtcatgattgacgcttctagagccagttatgaagagaacgttgcgttaactacacaagtggttgaacttgcgcataaagtcggagtttctgttgaagcggaacttgggacaattggaaataatggttcagcggaaggcggcgcagacaccatcatttatacagacccagaccaagcggaagatttcgttagtaggacaggcattgatacgttagcagtagctattggaacggcacatggtttataccctaaagataaaaaaccagaactgaatatgccccttttaaaagaattaaataaacgtttggatattccgtttgtacttcacggaggttcgggaaacccagataaagaagtcagtgaatctgtacagtatggtgttagaaaagtaaatcttagttcggatctgaaaagtgtgttttttgaagaagttcgccgagttttagtggacaatcctgcgatgtatgaaccaaatcaagtttatccatcagctaatgaaaaagttaaagatgttgtaagacataaattagacattttaaatactactggccaagcagataaatactaataagaagggtagaagcgctagttatagtgcttttgccctttaaggagtggaggaacatgttaagcacagcgaaggaacggcaactaaaaatcgttaatcggctaaaagtggaacaatttatgcggattattgatttagtggagtttgtcaactacagcgaagccactgtcaaacgggatttagtagaattagaaaaagaaggacttgtgagacgaacaagaggcggcgcaatgattatcgataataaaaaaatcgatttgccttatttaatgaaaatgaatgagagaagtaatgaaacgagtaaaataagaattgccgatattgcaaaatcacttattcgcgatgatatggtgattttcttagactcgagctcaacctcactgcatttaatcgacgttttaagtaaatttgatggcctgcaaattattacaaacggcgtcatgacagcttcgatgctgtcagaatttacaaatgcaagagttagtattttagggggctcgattttaacgaagcgatatacggtgaacggcgcaaaagcatataatgatgccttaacttataatgcggatattgcttttgtttcatgtcgcgggattgactatgacaaaggtgcaacggaaacacatgaaggtgaagcgctcatcaaacaagctttcaggcgccaatcaagttcgctcgttttacttgttacagaagaaaaagtaggacacaagtttatgcaccaaagcttagcatgtcatgatattgactatttaattacggatttcaaactggaccccgatgtagaggaacagttcaaaacccatcaaatcacttgtttgtattagattttatacttaaataggcaaaaataattgcaagtattaaaaacaaaacaggtactactaataaactcccgaaaaaatggatgtcgttaaaatcttggctatcaaatagtgataataatatgacatttttttgaatgacatttaaaacttgtaagcccataaaacatagcatactaagtattaatgaaacgaaactaaaaattttgtacatgttgtacctcccttttataatgttgaatctaatataacatgatatattgaattttaaaataaatgtacaggtaatttgaaaagctcgaaatccaattgatttcgagcttttagtataaataattcattttagacattgttcatttccttatccattcgccggacagtaagcccagacacaacaatactaatctcatacagcccaattagcgggatggtaatcatcaaatgcgataaaatttctggcggggcgatgaatgctgcgataatcaataagcaaaaataggcatattttcgcgagtgtcgcatgccgtttggtgttatcagcgacaatctcgttagtagcataatcaccattggaagctcaaataacacaccaaacgaaagcacgatttgtagcaaaaattgaaaataagtcgcgaggccaatcgttgtttcaacaccaagttcggccgcgaactggaacataaattttaaaataaaaggaaaagtgattaaataagaaaaaacaacaccgaacaaaaaaagcaaaaatgtaatcggaatatagcgcaaagtaattcgttgttcggatgcatgcaaacccggtttcacgaaggcccataattgatataaaataactggaaatactaagacgagtccaataacaaacgccatttcgatatagatttgaaaagcatccgtcactttaaaaacgtgtaaaatcacttcttttggcaaatcatctttttggagaaataaaattaacggcttggaaacaaaaagccccacaaagaaagcgagaaaaaaggatagcaggatgattaataatctggttcgcaattctttcaggtgtccagtgaggctcatggaaacttcggtcacgggcgcagatcttcttttttggtttcttctttggaatcatccatcatgcctttggtcgcatttttgaattcgcgaagagtatctccagcagctctaccaagttctggcagtttttttggtccaaaaatcacaagggcggctccgacaattaaagcaatacttcctggtccgatcatttcgatttcctccattctttaaatgaaaatgataatcattatcagttaattctaaatcgaaacctatcggatgtcaatctgtttttctattaacgttaacttaagcgcttcgtgattacttctttaccacgaataaagatcgcttcatggttactaataggatatatttgtgacttaccagcatattcagtcactattttttgcgttatttctttgaaaggcgtgttattgtagtgtggaagtgtagagaaatcgactaagtttaaggcgtcatagttggttaaattcacggcttttttggtgctatccattgtttggatgtacgctatattaggtgaagtgataactgctccagctgactcgccaatgtataatttgcctgccgcaatttcctctaaaattaatttatccgcaccagttcgttttaattcctgcaacaaaaagaaagtattacctccagttacataaataaaatcattttttcggagtttcgtcgtaatctcacctaagctttccgtagctatatcaagttcttccactaataacccaagactctctaatgcttttttaccagcctctacatagaaagtgacttcttcgactgtgctagcggtcgggataaaagtaacggtttttccttgcagattgctttcaaattcagtaaataatggcacaacatctttaaaagacgaggttaaaaataagtttttcatcattcgtagctcctttggtttagtttctaattatagtataatacttaaaggtatcaattagtgacaccttttaatctgaaaaaagaaaagagatggcgatgaaaaaatcagaacgattaaatgatatgatgctgtttttaaatgataaaaatgtgtttcaattaagcgatataatgacgaaatatgatatttctcgaagtacggcgattcgagatgtaaagtctttggaagaaataggcatgccgatatattcggaacggggacgaaatggtcattatcaggtgcttcgtaatcggctactctcgcccattgtctttaatatcgatgaggtatttgcgctctatttttcgatgcttaccttaaaagcctatgaaacaacaccttttcatttaagcgtggaaaaattaaaaacgaaatttgaacgttgtctttcagctgaaaaaatcgaaatgcttcgaaaaacagaagaagtatttagtcttggctatataaagcataataatcagtgtgaatttctagatgtaattttgcagtttacgatggaagaaaaagtgtgtcagattaattatgataaaaaagggatagaaaaaacatatgttgttcaattttataatatatcttccgcgtatgggcaatggtatgtgacgagttataacttcgagacgaaacggatgcaggtattccgctgtgatagaattcttgagctagaagaaaatcatgcttttgaagctaaaaaactgacggatttaaaaagcgagaccgactatttatacaagaaaaaagatgcaattaactttgaagtggaaattgcttccaacggtgttgacttattttttaaagaaaattatccatcgatgaaattgaatcaagaacaaggaaggaatgttattcgcggattttataatagaggagaagaaccatttattattaattatttgctaggttttggtgataaaataaacatggttcagccagattctttgaaagaaatgcttttaaatgaattgaaatctttacagaatcatttacaaaaattgtcgtgaaaaaaacttcgattccattatcggagtttttttatttgggtgaaaacattaaaaaatttattgacttttttgaacttggagaatatgataatgataatcattttcaattagaaaggaggatgaatggaatatgagtcatcggcttttaggtcgagttatgttgctattaggtgcattaggggtaattttgactatgagttttagttatgtagctgctgctgagaagccgaatattgataaacctgtcaaaggattagagcaaaccgaaaaggctattgtagctgatgattataataaagccaaagatgcttttcaagaagataaattatggtggtcagaaaataaacaagttgttaaagaaaaatcgtacgacttggccggccagatagatcggcaaattgctgaaatatcgcttgggattttaaataatgataaacagcaagcgatggatgggattacttcacttcataatttgctcaagacctatcaagatggtacatatacggataatgaaggaaataccaatattactttatcaagctacattgctaaactaactgcgacgaaaaaactggtagatgagaaagaatgggcaaaagcggcgacgcaaattcaggatttaaaaacagaatggctcgcggtggaaggtgatgtggtcagccaatcgcaagcggcttacgacaataccgagcgcgatttaatgctgcttgatgcttatattaatgatcctgcgaaacaagctaaaacagcagatgttctggacgggatgacggaggagttaaagccttttgcggatgtgacttacacgtggttcgatgctgcgttaatcccgtttcgcgaaggactggaggcacttttgattatcgcgacgctccttacttatacaaagagaacgaagacacgcacggcgaaaagatggattattggtgggacggcagctggtttggtggttagtttggcgctcggcatgattgtggcgttttggctatcggcgcttgcctttggagataataacaatttgattaacggttgggctgggctgattgcaagtattatgatgctttatgttagctactggttgcaccgaaattcggatattactcgttggaataattacatggaaggtaagagtaaccaagcactttcgaatgggaaaatgatttcttttgcctttttagcgtttttagcgattttgcgagaaggtttagaaactgttgtcttcttaattggtatggttgggcggatgtcgaattttgaattattgatggggattttggcggggcttggcgtgttattaatcatcgcttttgtgatgttgcgatatagcgtacatattcctgtgaagccattctttatgatttcgagcgcgattgtgttttatctgtgctttaaatttatgggatcaggaattcatagcctgcaacttgctggggtcattccaacatcggtagaagattacttgccatccattccagcgctaagtatttacccatcatggtatagctttttgccacaagtattactcgttatttttggattaactattctaataaaacaacaaattaaaaaaaagagctgattctaaaaaggaattcgcgcaagggggcaaattatgaaaaaattgattattgttatgttgactatttttacagcggtgttggttgttggatgtagcgggacggggacggcggacaaagcggaaacgaaaaaggaaacaacgaaagaaagtaagcaagcaaacgcggtcaaaaaagaagtaaaagaaatgaaatcaaacttggatgacgtgaaaaaagccatttcggacaaagataagagcgcacttcaatctagtgcggctgaactacacaaacattggttagaatttgaaaataacgtccgtgacttgtatccattgcaatatacggatgtcgaaaaatatgaaacaccgattttctatgaatcaaaaaatgataacccgaattttgatacattaaatgacaatgcgactggacttgacggagcattagatacacttgaaaaggccaaagagaccaaagcgaaaacttctgaagtgctggataaagcggtagataactattctaaatatgtgacggagcaagtagatgaattcgttgctcaaactgaaattttcacaaatgctgtaaaatcgggtgatatcgaaaaagcaaaagctgcctatgtttcaccacgtctgaattacgaacgcattgagccgattgccgaaagttttggcgacttagatccaaaaatcgatgctcggattaacgatgtggaaaacgaagcggactggactggtttccacgtaattgaacgcgcgctttgggaaaagaaatcgctcgaaggcatggatgtttacgcggataaacttttaacagatgcgaaggcacttcaagcagaagtgaaaaacttgaaattagagccaaaaccaatggtcgcaggtgcgatggaattactaaatgaagccgcaacaactaaaattactggggaagaagaagcatactcgcacacagatttagacgatttaaatgcgaatgtcgaaggttcgaaagtagtttaccaagcgattattccggctttaaatgcacaagataaaaaattagctgaccaaattgatgcagctttcaacaaaatggaagacacgttagcgaactacaaaaatggcgactcattcgtactctatacaacattaacgaaagaccaaattcgcgacattagtgaccaattgagccacctttccgaattaatggcccaaacagggaaaattttctaagcataggaaggaaaacgatgacagataagaagagcgaaaatcagacggaaaagacagaaaccaaggaaaataaaggaatgactcggcgcgaaatgctgaaactttctgctgtagctgggaccgggattgctgttggtgcaactggtcttggcacgattttaaatgtggtggatcaggtggacaaggcgctcactccgaaagaaaaggcggagacaggcgtaccgttttatgcgtcgaatcaagcgggaattattactgcgcagcaaacctattgttatatcgccagctttgatattcaaacagaatcgcggcaaattttgcaagatttgtttgtgaaatggacaaaatttgctgatttgacgacgagtggtggggttttgcgtgatgtagataacgacatgttaccaccgaacgacactggagaagcggatggactaggcatttctaatttcactgtaacacttggttatggtccgactttttttgaaaaagatggcaaagaccggttcggtgttaaggcgaaaaagccgaagtatctggaaaaaattccccatatggcgcatgatagcttggatgaggcttattctgacggcgatttatgcatccaagtgtgcgccgatgaccagcaagtagctttccacggaattcgtaatttcatccgtttagcgagcggcgtcgcagttgttcgctggattgaagaaggttttctcagcgcaccaaaaaacgaaacaccgcgaaatctgtttggttttaaagacggaacggcaaacgttgaccacgattcaaacaaaggttataaagacgtcgtttgggcggaaaaagacgaaccagaatggatgcgaaacggcagctacctcggctatcgcaaaatccaaatgctcatcgaaatctgggaccgctcctctttgcttgaccaggaagacacttttggtcgaaaaaaagcatccggcgccccgtatcacaaaaaacatgagcacgataaagtcgacccgagcaaactgccagctgattctcatgtgcgtctagccaaagacaccaagcaacaaatgcatcgccgcgcttattcatatacaaatggcattgataaaagcacgggaacgattgacgctggattactattcatttgtttcacccaaaatccagccaaacagttcttgccaatgttaagtatcatggggaaaatggataaattaaacgaatacaccgtcccaattggcagcgcgatgtttgcttgccaaggcggacttgctcccggagaaatttttggagaaaaactactttagtctaaggctcgcgagccttagactttttttgtataatgaaagcaagtcaatgattagagggagccgattttagtggaagaatgggatttgctaaatgagaatcgtgaattaaccgggaaaacacatatccgcggtgaaaaactagcgcccggagaacttcatttggtcattcacgtatgtatttttaacgaaaaagggcaacttttaatccaaaagcgccaaaaagataaagaaggttggccgaattattgggatctttctgcggctggatctgcgctaaaaggcgaaactagccagcaagctgctgaaagagaagtgcaagaagagttaggcattatgattgatttaagtggaacacgcgccaaattcagttatcattttgaagagggctttgatgattattggtttattacaaaagacgtgcaactaagcgatttaacattacagaaagaagaagttgccgacgcccgttttgtcaccaaagaagagttagaagcattaagaagttcaggcgaattcattccttacttctttttaaaccagctatttaacctgaaaaacgctacaacaatccacttttaacgaatataactaaatttccacttaacaaattcgtttcctacacttataatagtacagagacatgagaaaaactccaattagaaagcgagtggtaatatgggccgtaaatgggcaaatattaaagagaaaaaagcgtcaaaagataaaacaaatagtcgtatctatgcgaaatttggaattgaaatatatgtagcggctaaatcaggcgacccagatccacattccaaccaaaaattacgttttgttattgaacgtgcaaaaacatacaatgtgccaaaacatattattgaccgcgcaatcgaaaaagcgaaaggcactggcgatgaaacttattcagaactgcgctatgaaggctttggtccaaatggttcgatgattattgtagacgcactgacaaataatgtgaatcgtacggcatccgatgttcgcgcagcttatagcaaaaatggcggaaatatgggcgtaagtggctctgttgcttatatgtttgataatacagctatttttggcgttgaaggaaaagatgcggacgagctattagaacttttaatggaagcggatattgatgttcgtgacattttagacgaagatggccaagcaattatttatgcagaaccagaagatttccataaagtacaagagggcttgaaagcggctggaattgaagaatttacagtagcggaaatcgaaatgatccctcaaaatgatattcaattatcaggcgaggacttagagaaattcgaaagactaattgatgctttagaagatctagaagacgtgcaaaaagtatatcataacgtcgaattagaagattaacatccaactattacaacaatcggaggaattgataaaatgtcaaaattaccaaattgcccagaatgtaactcagaatatgcctacgaagatcgcggcttattaatctgcccagaatgcggacatgagtggagcgcagcggcagaagaagctagcgaagaaaaagtgttcaaagacgcaaatggcaacgtactaacagatggcgattctgtaacagtcatcaaagatttaaaagtaaaaggcgcatccaacccaatcaaaatgggaacaaaagtaaaaaatatccacctagtagacggcgaccacgacatcgattgcaaaatcgacggcttcggcccaatgaaattgaaatcagaatttgttaagaagatataaaaaaaacagcgattctctactaagagagtcgctgtttttattaattctgcacaaaaaccgtttcaaacacaaacgattcatacgtatggcgcgtaatcgaatattcaaacactcgaccatcttccaaatgcgccaatttctcaatttccatcataaaagtaggttcttctaaatcgaggagcttactatcctcttgattagatttatctccacgtacccaaacatgcgcactttgcatcttaagtttcaagtcatcccgaatgtaattataaattgagtcctctaaatgacgcggctctaaacccggaataatcgcaagtggcatataagtatgttcgatggaataggctttatggccaacttctctcatccgaataattcggtaaatataatcatcctgcatctctaatttttctgcgacttctttcgatggtttttcaatggaaaataaaataactttggatttaatgttgtcttttccaaatgtatttacgagtccggacattgggcctagtgcgaattctccgccgttagtagaatgagatttcacgaaagtaccagcgccgcgtcgtctaataaccataccttcttgcacgagcatatccagcgcttttttgacagtaagtttgctgcaatcataaacgcgtgccagactatccccgtcaggcaatttctcgttaatttcgtatttgttttggttgattttatcacggatatctatgtatatttccatgtatttagccattcccgacattttattggctcctttactgatgtaataagcatagtataacatatacttttgcaaaaaggtatccctataactaaaagtatatatctttttataaaagtattgttttttaaataaatgtatgctatatttattttgacaaaagggaggccataaaaaatgaaagaattattaacgtttccaaaagatttttggtggggctctgcgtggtctgctgaacaagcagaaggtcgcggtgacactggtaaggcaaaaactgtttgggagcattggtttgaaacagaaccgaatcgcttttacgaaggcgtaggttcagaaattacaacagatcattttaatcggtataaagaagacgtacagtggatgaagaaaacaggacaaaattcgttccggatttcgatttcatgggcgcgaatgtttccagatgatggtgttggcgaagtgaaccagaaagctattgcgttttatcgtgatttacttactgaaatgaatgaaaacggtgtcaaaccattcgcgaacttataccatttcgatatgcccgttgcacttcaagacgctggtggctgggaatcaagggaagttgtggatgcctatgttcattttgcggatacttgttttaaagaatttggcgatttagtttatcattggtttacatttaacgaaccacttggcccgattcttggcgggtatttagaaggtttccattatccgaatcaaattgacttcaaacgaggcacacaagctggttttaacacgattttggctcatacattagcaattaaagcattcaaaaaaataaacttatcgtcgaaaattggcgttattttaaaccttagcccaacgtatccacggagccaaaacgaatacgatttagaagcagccgaaatctgtgatgctttttatacgagaagcttcttggatccgatggttaaaggaactttcccagaaaaattagttgaaatcatgcgtgaatatgatcaaatgccggaatatacggaagaagatttgacgattattaaagaaaatacggcgcaaattcttggtttgaactactatgaaccaaggcgcgtgaaagctcgtttaacggcaattaatgaaaaaagtccgtttttaccagattggttttttgaaccgcataatatgccaggtaaacgcatgaatatttaccgcggttgggaaatttatgaacgtgggatttatgatttatgtattgatattcgtgataattacggtaacatcgaatcatttatttctgaaaatggtatgggtgtagcaaatgaagaacgtttcttaaatgaagaagggcaaattcaggatgattaccgtatccaatttgttaaagatcatttggcatatgtacatcaagcgattgcagaaggttgcgatattaaagggtaccacttatggacgtttattgattgttggtcttggattaatgcatataaaaaccgttacggactcgtttcacttgatgttgaaactggcaaacgcaccatgaagaaaagtggcgaattttataaaaaaatgagcgatatgaacggttttgaatatgaaacaagcaaactagttgggacgaaaagggaggaaacaactaatggctgaaacgaaaaagaagtcgattgttaatggatttattaatgtagcacaacgtctaggcggacaaattcatttgcgctcattgcgtgatgcttttgcgagtattatgccgttcatgattttagctggttttgttacactgattaactatgttattttagaaccgaccggctttatgggcaaaattgttaacccagatacacttagaacttggcaagagattggtatttcaatcggaaatggtacgttaagtgttattacgcttttagtcactgtagcgatttcgtatcatttatgtttgaaccgcggctataaaaacgtcattgctccaattcttgtcgctttatcttcttttattgttgtaacaccgattgcgatgacgttccttccagaaggcgcatcaaaatcaatcgaagtaccgaacgttatcccagttagttatactggtgcgtcaggtatgttcgtcggtattatcgttggtttaattgcaaccgatttattcattaaattatcgaaaaacaaacgcatgcaaatcaatttaacaggaaatattccaccggcagttattaaatcatttaacgtgttaattccgattatgattacggttattattttctcagttatgtcatttgccgttaatcaaattttcagcatggactttaacacacttgtgacaacgattatcacaaaaccacttagctatgtaacgacaagtcttccaggcttcttgcttattacttctatcgctaacttattcttcggtttagggattcaccaagcagttatttctggtccgttactagatccatttttactgcaaaatatgcaagaaaatatggtagcctacgctaatcatcaagaaattccacacattattaacatggctttcaaagatacatttgcggttatgggtggctccggaaacacgattggcctattaattgccattttcatctttgggaaacgaaaagattacaaagatatctcgaaactatctgcggcaccatcactatttaacattagcgagccaattatctttggtctaccgattgtgttcaacccgttacttattatcccgttcgtattagcgccgatcttctccttaacaacagcgtattatgcgacagcagcaggttggattaatcacgtagtcgtacaaaccccgtggacaacaccgccgattatttcaggtttcttagcaactggtggagactggcgcgcgtccgttttacaagtaattatcattgttgtgactgtctttatctatctgccattcctacgcatggatgaaaaagttgcttttgctacagctcaaaaatcagacgcaaaataaggaaggatgtttaaccaatgaaaaatattttattagtatgtaacgctggtatgtccacaagtttcttagtagaaaaaatgaaagcagcaggcacggaacaaggtgttgaagcgaatatctgggctgtatctgacgctgaattacacgaaaactgggaaaaggcagacgtcattttgcttggaccacaagttggttatttaaaaggaaatacagaaaaggtagttggcggaaaaattcctgtcgaagtaattaatatgctagactacggtcgtgtaaacggagcggcagtgcttgaaagagcaatcgaattaatcggttaaaaaagtaagggagtgtggcttatagtcgcactccttttttatcggccaagaaagtgttataatgtgtgaaaaggagcggaattattatgaaatatgtaaaatcacaaatgaaagagcttgtaaaagatagcgtagacttgcaagaacgccttcaaaagctaatgaaagaaatggacttagaaaaaactttcgctttaaaagcactttatcattcagaagtagctgacggtggcgcataccaaacagcgtatcaagatttggattataaatataaagattaacatcaaatggctctgctaaacaattagcagagccatttttagatatattttccttggatttcctttaagtagtcaataaaattatcgtaaaagtcatcacggttttgaatggttacatgcgttccaagttggagcaaaaagcggtacccagcctcatggtcaggaagcgtcacttttgccagaaaatgcgcgtcatcttgctgcgaaatttcgactaggtcaaagcgttcgatgatttgctcgcgggcaattttgtcgacaatcaaactaacttcatgcatcaaaaacattggtctgtcgggcggtgcgccaaatggttttacagtaaaaggacgtacttcaaaagtttcttctagtgttttcagttcgacaatccgcgacattttaaacgtccgaaaatcgctacgctccaagctgtaaccctgcaaataccaagaacgattcctaaacaggaggtgataaggctccgttttacgaacggtttggttgcccgttcgatcaatatagctgagttccacgagttgatgttttttaatcgctaaatacaaactttcgactttagcatttaattcgtttttcatggataaattggagaaatcgagcgaaatggaacttttaggtggttcgcttgaatggtcgagcatatttttcattttttgcagcgttttcttagtttcggcggaagaaagtaactgctccatcccgtccaaactggcgataatcgcggttaaatcatctgctgtcagaagctttttatcgactttgtaggttggcataataccgatgccgccctttgttccagcaattgtgtaaatcgggatattcgccatcgcgagtgtatcaatgtcgcggaaaatagtacgtttggaaacctcaaacattgtagccatttcagaagcactgactagctcgcgttggaggagcagcataataattccgatgagtcgctcgattttcatttttttctcctttgttttggaatgatgacagacagttgtcatcattcgcgtgttatagttacatcatatcaaagttaagtaactttttggagggaaatattatggcatttgaaatcgttgaattaaaaaaagaaacatttacaggaaacaaagtagaaatccctgaatttgatccacaaaaaggctttggcccaatgagcgaaattaaagaagcagcctacacaaaatttgcaaaaaacgaaaaagattacgttggcattaacgcaagtcttgacggcttacaatattacatcgtagcaagtacaaacggcgaaaacggcgacactactttcgatattccagaaggcaaatacgcaaaattcgtaacaagcgaaacagaccgcccagcacttgatggcttcatcggcgcatcttacggcgaagtaggccaaagcgatacggttggtattgcgggatcgtttaatttggaagatcttagagaagctgagtttacgctttatattccggtagttagtaagtaatttgagggacccctttcggtggagaggggtctttttttgtgctcataattaaaaaagtttgaaaatgcactaattagttctgtatttgactacggttttacacagaggttcacaaaacgctcacaaaagggaagcagtgctagtgctataatggaagggtggaaaactacaaataaaagcaagataatcttcaccttaaaaataggagtgacgatagattgagaaaacttgatttcagctacaataatgctaattataatgcagaatttttaatgaaaatattaaccactttaaaagatattaccaaagttgagcagttcactatcgaaataatagatgcagttccaaatgatcaagagcaattcaaggaagaaaaaggactatttagcaaagaagtttttgattttaataatttagtaaaagaatcacatggcataaaaatagattttaaagaaataacaaatattttgaaacaatgtagaacagtttgggaacttagtatgttggttgttacatctgagaatgaattaaatgatagtggaaaagtcttatgtgaagtggagcttatagagggagatttgtttgcaattctttatagtgaagactttaatattgatttatttttagaaaaatttagcactgatgaaattactatagagggctaaataggagaggaagttaaatgtttaaaattattgaatcaaaaataaagtctcaaggacaattgtcttatttcaaagattcacatgagtttatatcagaaccaagaattaattctgatacaactattttagtaggttacatatacattggttttgattccgagtataacgaatcaacacaaatttggggatttcaccatgattttaattggaaatcgagtaagttgacacctcctaaatttatacaaggaaagattattttgaatgaagattttataaatcctggcgaaagtaaaagaataggtgcagcaaattcgtgggaaactatttatgatgaaagtagtgggtggcttagatttggaggagtaaataattcggttgaaacctgttatgtagaatttttccctaatactataatgggaattgatgaaaatggcgatatcacggagttatggttgtgccccactttgaaataactaagtgagaaaaagatattatggataaaataggtgaaatacattctatttattcaacacaaaagcttaaaaaatattataaggatgataaagaaaaaaatcttgtattaggggataaaacaaagaaaatgttgaatgaattattaagtataaacagagaaataatatgaataaatttaaaatcctaggtgaatataaagactggtgcgagatttataaagatggaaccctcattcataatggttcatctttagggattgtaagccaagtagagtctgaactttgtttaaggttaaattacggaacaaataaacatttctattcgatattgaaaaaatgtggtgattttattttagccgtccctaagaaagtgggatttttaaaagctgaatacaaatatgaacctattatttttaataaacaagaatttgatgaatttattgactgtatttatgtagatgaaaaattgatttctagtatacctcagttaaacaaggaagatattttaaatatgtggttcttatcaaatccactgcataaaacctatagcaatgaaatggaaatgcaggaaaatattattaataatattttattcttttctgacgatgagtatgatatatcttgtctaaaaaaggttattaataaacctgatttatcagtacatccaatagacagtaattatgaagttatcacgatttatatggatggagatgcaggaatgtatgagtggaagggcatagtaattatagataataacgcttatttaaaaattgatacacattattatataaattaaatgcaagaattcaagttgttaaactagcgtatattagcagtgaatcttttgatgataactgagatttatatcgttctataaatggtcctaaagatgctcaagttcgaaattatagcagattaatttctgagtattttaaaactaagccactattaagaatatgaacctccttatccattatttagtaagtagatggaatgataaataaaaaataggagtgatttttatgatcaatgaacttcaaaagaaaattgatgaaataaattactgggatttactagtattagacattcaaagtaaatattttggtgatgaagtatatatttatatagaaaaagatgaggagatttgttggaagctatcatttacttcctgctataaagtttcctatgagaccgatgcaaaatggcgtggagatttcaaagttagaaatacagggccgaaatcaggctattatgctcaagacatttcgttaaatagatatgcggaaaatgaagactttattgaatgttcttttgatgcatcaattatgacaatgaatattatttgtaaggaaatcattgtagaagaagtaagtgtcatagaaaattcgtttttttggaaaaattattaaaataaagttcagagtttgtgaatataaaaagaagccccattccatcaaatggggcttccttcatcacataaactaaaccaacctcaccaaaaccccaacatcctcacaataccccaaacacccaccagctatgtccttcgacgtaaccaaccaatcaaattccgccaactccccgtatgtaagcaaagccgacttatccaccttcgtatgatccaccagcaaaaatttcgcagtcgctttttccatcatatggcgcttaatctcatactccaaaatatccgagttcatcaccccatgcgcagtcgaaagcgcagtcgcggccatgaatgctttcgtaatattatatttctcaaaaaatccccagttctccacgccaacaaaagatttagtactcggtttaaaagtcgaaccaataacaatcaatttcacattatccatttcactcgcaaaattgatcacatctaggctgttcgtaataatagtaatctccttatccgttggcagagccgcagcgagacagctggttgttgtgccggaatcaataaaaatcaaatcattttcttcaataaaatcagccgccgcttttccgataagttgtttttctagatgattttccgtatcgcgattttcaaacgggcggatttcttcgggattattataaacagaaacgacgccaccatagactttttggatggtgtttttttggagaagtttggcaatatctcggcgaacggtatttttggaaacgttgaattgttcgcataaatcatcgaggctaatactgcctttttcgtgaattaaattctcaatcgcttgaatgcgttgtactttcattttaaattcatcctttggcaaaattatttcaattacactatttataacacatgctcaaaaggttatcaactgtgattttttatggtgaagttagtgacaaaaattaaattgactcttcaattttattggcttaatatgggggtataaatcgattgatggttaacttatgagtaattttaagtggagggattatttatggcagatgtacggaaattaaagaattatattgacggcgaatgggtcgagagtaagacagataaatatgaagatgtcatcaatccggcgacgggtgaagtgctgtgccaagtgccgatatcgacacgcgcagaattagatcaggccgctgtcattgcagaacaagcttttgaaaaatggagccaagttgctgtgccaagacgcgcgcgcgtattattcggattccaacagttactcattcaacataaagaagaactagcaagattaattacacttgaaaatggtaaaaatttatccgaagcacgcggtgaagtgcaacgcggaatagaaaatgtcgaattcgcagccggagcaccaacgctgatgatgggtgattcgcttgcttcgattgcaacggacgtggaagcggctaattatcgctatccggtcggagttgttggtggaattgcgccatttaactttccgatgatggttccttgttggatgttcccaatggccatcgcgcttggtaactcgtttattttaaaaccatctgaaagaacgccgcttttgatggagaaattggtggaattattttctgaagcgggtcttccaaaaggtgtattcaatgtagtgtacggtgcgcatgatgtggttaatgggattttagaaaacgaaataattaaagcggtttcttttgttggttctaagccagttggcgaatatgtatacaaaactgggagcgcgaatttgaaacgtgtgcaggctttgacgggcgcgaaaaaccatacaattgtgcttaatgatgcggatttagaagatacagtcacgaatgttatttcagcggcatttgggtcagctggcgaacgttgcatggcgtgcgcggttgtcactgtggaagaaggaatcgcagacgagtttttagaggcacttcggacagcggcacaaaatgtgaaaattggaaacgggctagacgatggtgttttcctaggtccggtaattcgcgaagaaaatcaaaaacgcacgattgcttatattgaaaaaggcatagaagaaggcgcgaaattaacggtagatggccgggagactggactttctgaaggccattttgttggaccgacaattttggaagacgttacgacggatatgacaatttggaaagacgagattttcgcaccagttttatccgtgattcgtgtgaaaaatctccaagaagcagttcgggtggcgaatcaatctgaatttgcgaatggcgcttgtattttcacaaataatgccaaagcaattcgctactttagagaaaaaattgatgctggaatgcttggtgtgaatttgggcgtacctgctccaatggcgtttttcccgttttctggttggaaatcatccttttatggaacgcttcatgcaaacggcaaagacagcgtagatttttacacacataaaaaagtagttactgcgagatattcattaaaaggttacgaagaataggagggcgcgaacatgggcaaactgttacgaaaaccattaaatgaaagaatagcgcctggcgttacgcttgttcaagatattaaccaaggaaactcgccgctaagttacgttggatttcggttgattgaattggaagaagatgccgtttatcaagaaacgttggatgggcttgaatgttgtattgtcgcgcttactgggaaaatttcggtgagtgagggtgaccatgttttttcggaaatcggcacaagagcgaacgtttttgaaaaaattccgactgatagcgtgtttatttctggtgggcgggcgtttcaagtgaaggcagacgctgaaaaagctcgtgtggcgctttgctattcaccggctgatcgaaatttaccgacaacgcttattaaagcaagcgataattcgattgagcagcgcggaaaatatcaaaataaacgactggtacataacattttgccagatgtgagtgaggttgcgagtagtttgttggtggtggaagtgtatacggatggcgggaatttttctagctatccgccgcataaacatgaccacgataatttgccagcagagtcacttttggaagaaagttattatcatgaaattaatcctaagcaaggttttatttttcagcgcgtctatacggatgaccgtgcgcttgatgaaacgatggctgtggagcaccaaaatgcggttatcgttccggaaggctatcatcctgttggcgttccagacggatatgattcatactatttgaacgtaatggcagggccgaagcgggtttgggagttccataacgatccggatcacgaatggattttagagcgagactaagaggaggacttggagcatgaatcttaaaaaacatagtgaacgaaaatttgatttaatcaccgtagggcgcgcgtgcattgatttgaacgcggtcgaatacaacagaccaatggaagaaacgatgacattttcgaaatatgtaggtggatcgccagcgaatatcgctatagggactgctaaactgggcttaaaagtcggttttatcggtaaaatttcagatgatcaacatggtcgttttattgaaaaatatatgcgtgatttagcgataaatacggatggaatggtgaaagatacagaaggtcgtaaagtgggcttggcatttacggagattaaaagtccggatgaatgtagtattttgatgtaccgcgaaaatgtggctgatttatacttaacgccggaagaaatttcagaagactatatcaaagaagcgcgcgtgctgctcatttctggtacagccttggcgcaaagtccgtcgcgggaagctgttttaaaagcagtcagtttagctcggaaaaatgatgtggtcgttgcttttgaattagattatcgtccttatacttggaaaaacagcgaagaaacagcagtttattattcacttgtcgcggaacaggcggatgtgattattggaacgcgtgacgaattcgatatgatggaaaaccaagtcggtggcaaaaatgaagcgacaaaagcatatcttttccaacatcaagcaaaaattgtcgtgattaagcatggcgtggaaggctcgttcgcatatacaaaagcgggcgaaacattccaagcacaagcatataaaacaaaagtacttaaaacatttggcgcaggggattcctatgcatcggcattcttatacggtttgtttagcgatgaaagtatcgaaacagcccttaaatacggaagtgcggcagcttcgattgtggttagcaagcatagttcttcggatgcgatgccaaccgccgacgaaattaaagcgctcatcgcgcaagctgagtaggaggggattatggtgactgaaaaaacgattcgactaacaaccgcacaagctttggtaaaatttttaaatcagcaatatatcgaagtggacgacgaaatggcaccgtttgtggacgggattttcacggtgtttggtcatggaaatgtggttggaattggccaagcgttagaagaagacccgggtcatttaaatgtgtatcaagggaaaaatgaacaaggcatggcgcacgcggcaatcgcctacgcaaaacaaaaaaatcgcaagcgcatttacgcgtgttccgcatcagcaggaccaggttccgccaacctaataacagcagctagcaccgcacttgcgaacaatttaccagtattattcctgccagccgacacattcgcaaccagacagcccgacccagttttgcaacaactagagcatgagtcgagcgcggcgattacaaccaatgatggcttccaagcagtctccaggtacttcgaccgcgtgcagcgaccagaacaactcatgagcgccctgattcgcgctttcgaagtaatgaccaacccagcgagcgccggcccagctacaatttgcatcgcgcaagacacagaaggagaagcgttcgattatccagtcgaatttttccaaaaacgaattcactatcttaatcggcaaattccaacgaagcgcgagctaaccgaagcggcgcgactcatccaagctagcaaaaccccggttatcatcgtcggcggtggcgcccgctattcagatgcgcgcgaagaattaatcgctctttccgagcaaagcaacattccgctcgtcgaaactcacgccggaaaatcaaccgttgagtttgacttcaaaaacaacttaggtggcactggaatcctcggcacgctagctgccaataaagctatccgtgacgccgatttggtcatcggaattggcacgcgctacaccgatttcacaaccagttccaaaactgcatttggcccagcaaccaaatttatcaatatcaacgtcagccgcatgcaaacatacaaactagacgctttccaagttgtcggcgacgccaaagctaccctagccgaacttgcgccacttttaaaaggctatcaaactcaatttggcgacaggattgctgtatacaaagcagagtggctcgcagaaagaacgcgactacaaaacacgaaattcaaccgagaagctttcacaccagaaatcaaagaccaattcgaccaagcaaccctaaacgaatacgccgacagcttacaaaccgagttcacgcaaaccgaagcgctcatcacgattaatgacaccgtggcaccagatagtatcgtcgtttgttcggccggttcacttccaggcgacctgcaacgactttggaatccagccgtaccaaacacctatcacctagaatatggctattcctgcatgggctacgaaataaacggagccctcggtgcaaaaatggccgcagcaaacaaccaagaagtttattcaatcgttggcgatggcagtttctgcatgtcgcactcagaactactaacatccttacaatacggcaaaaaaatcaacatcatgctcttcgataattccggattcggctgcattaacaacctccaaatggcaaacggcagcgacagtttcttctgcgaattccgcgatagcgacaaccagattatgcaagtcgattacgccaaaattgcagaagggtacggcgcaaaagtctatagagccaacaccaaagaagatctaatcagcgcactggaagacgcaaaaaaacaaaccaaaacaactttaatcgatatgaaagtattaccaaaaactatgtcagaaggctatcttaactggtggaatgtgggagtttccgaagtttcaaacaaagaaagtatcaagcaggcatacgaagaaaaacaaacaaacctgaaaaatgcccgactatattaagcaaaacaaaaacaagtccatcacaggacttgtttttgtttggacacttcaatagccacgccttgcatcgcgccagtttttctttataataaaaagtaactgtaagattactttttttaggaggaaataatatggaagtttttgcagaatatttagctgaaattgaaaatccggatcaccgcgcgagaacacaagaagttttaacatgggtggcggaaacttttccagacttaaagccagaaattaaatggaatacaccaatgtttacaaataatggcacattcataatcggcttctctattgcaaaacagcatatgagcgtttctccagaagtggctggaatcgaacgtttcgaagcagacattaaagaagcgggctatagtcatacgaaaggaattttccgaattacgtgggctaaatcagttgactatgacctattagcaaaaattatcaagtttaatattcaagataaagcaaattatactagtttttggcgtgtttaaatgatttttagttactttgtcgcgtagtaaatccagattttttatgccataattaataagctaaaatgtatttttataaaagagtggtgtgaaatgcgtattttttgtgggattatgtccatccaagcaggttttattggtgctcttgctgaaatactaagtccggacagtaaaaaaaataacttattcatgataccggaagatcttgcggcatcatcaggctatttaatgtcgcttgcgatggttttagcaggaattctaataatttgtgcttatcgaaatgattttctaatattcatggcactaattttatggctctttggacttatttttgggctcattttcaccccgagttattcgggtttttatttccgcccaatcgtatgtttaataagctttttaatgggcctatttatttttacagattacacaaggcaccaagacacaggcgaggaaaggtgagcggattgctcatctttttttatttacattcgtaccgaccgcgaagtcccaaactgcaaaccaagatccactagcgcacaaatccaaatactcacaaaactgacaaataacggcaaattaatatacaaattaacaaaaaacagccccaccagaagtaacaataacaacgcgtctttccaaaaagaaaagctcacttcagcctttttatgagcggcaaaaacgaattgcttcgagatgaaaaacacagctacagaactaaacaacagcaacagcaacacatctcgctgtaaatgcccctcaaatagcaaatgcaaattcacagcaagcaacattaccgaaacaataataaagaaatgcccgtaaatcaaaaactgcccgtgcgtcactttatgatgatcaacaattttctcaaagctataaaaatacgatgcccagagcgtacaaataattagaaagccgagcaacgtataacaaattgtgtacaaatcaagggtatgaccaactaaaatagtagtaatcgcaacgatgctttcgccaaatgtaataataacaaacaatccaaaacgttccgcaagatgcgggaaatcaaccggcactttgcgtaatgttttagctaaaaataacggtaaaataatatcaacagcaatcccaagatacataactaaataacgcgcaaacccttcaaaaaacaccgaagtcgcagttgtcaaaacaccaagcaaaaaaacactcccaagaagtaacgccactttctgcgcatttcccgtcaattgcttactaataacaaaatactgaataaccgtaatgaatcgaatccccaaatatccaattaaaaaagtgtagtacgtatttgaaaacgttaaatcaaaacttgctgtcatcaaaattaagaaaaacatctgtgataacatataaagctcaggccattttattttctcaccgaagcgattgaaaaacatcgtctgcccaacccacgcccaaaacatcggcgtgaccatcaataaatactcaccaaaataagcagctgttttatccggatggttatcaacgctaagtaacagatgtgtcgtcgaagcaacagcagttacgaatattaaatcaaaaaatagttctaaccaagaaacttttctttctgtcacgatttcaccccattatcatttcttttttaaattataccacgtgaattgtcctaccttttgacagttgcttgaggtgaaaagtataatggaaggacaaaatcatggaactactgagacgggagaattaaaaatggtaaaaacatgggaagaatttttaaaacaagaagcaaaacagccttattttatagaattaatggaagcagtcaaggatgcgagagcaaagggtaatgtgtatccgtcagaggaagatatgttttcgtgtttccgcttatgtccgtataatcaagtgaaagtcgttattttagggcaagatccgtatcacggtcctgggcaagcgcatggcttaagcttctccgtacaaaaagacgtacgaattccacctagtcttcgaaatatttataaagaattaaagacagacttagatatcgaaccagcagaccacggctatcttgctaaatgggcagagcaaggcgtactacttatgaacacgagttggagcgttgaggaagggaaagctggcagccacaaaaaactaggctgggcaacgttcacagatcacgttttagaagaactgaataattacgacaaaccactcgtatttattttatggggaaatcatgctataaaagccgcaagtggcattacaaacccgcaacatctaattattaaaggagtacacccatcaccgcttgccgcgagtcgaggcttttttggaagcaaaccattttcgaaaacgaatgcgtttcttgaagaacatgaaagaaaaccaattgattgggacttgaacgaacagtaaaaatcacgttattacaaaattttgtttcttctattataaagttttctacaaaagtgaaaaaatttacataattcttgctaaaagctttttacataaggtttctttcatgttatggttattataggagaaagtaaaattttaaaaagttcctaaagaaggtgactagtttgaagcataattttacagaagatgactttgtttatggagaatcatggggactcgtgcatcggggggttttagaggacaaagaagtagaaagaatgaaagcgctacgagacaaagtagtaggtaaaaaaggtgtagcacaaacgacacttaagccaattggcagtgtcagaatagacggagaggtctatgaagctcgcttaaaaacaggttatttggaagttggaaaaccaataattgcagtaggtatcgattttggatacgtactagtcaatgaagatatacaggagggagaaaaatgacaatgattggaccaattattatcgcagtattgattatcatctttttaatcgtatttttcactttagtaccagtggggttatggattagtgcattatccgcacgtgtaccagttggactaggaactttaatcggaatgagattacgccgggttgtaccttctcgcgttgtaaaaccgttaattaaagcagtaaaagcaggacttgatttagaagtaaaccaactcgaaagtcactatttagcaggtggggacgtggataacacagtagatgcgttaatcgcagcacaccgagcaaatattgaattagatttcagccgtgcagcagccattgaccttgctggacgtgacgtacttgaagcagtacaaacttccgtaacaccaaaagttattcgtacacctgaatttactggtgtagcgcaaaacggggtagaagtaaaagttattacacaaattaccgtacaatccaatattgaacgtatcgtcggtggtgctggtgaagatacagttatcgctcgtgtcggtgaagccgtagtttctacagtcggtgaaacgagagaacatacagatgtactcgaaaatccaaacagcatttcgaaaaaagtccaagaacaaggacttggagacggaacagcttatactattttatccattgatatcgccgaaatgcgtatcggtgacaacattaaagcaaaactagacatcgaaaaagccaacgcggacatggaagttgctcaagcagctgcatcgaaacgtaaagcagaagcgattgcactagaacaagaaaacagagcagcggttgtagccgctgaagcagaagtaccacgtgcgctatctcgcgctttagaagaaggtaacctaggcgtaatggattactacaaaatggaaaatgtacaatcagatacagctatgcgcgaatcgattgcacacgaagacgaaaaataaaccttgatcttttgcaagaaagaaggtgttttcaatggatttaagtgattttctaaatagtggatgggaaagcgtcctagttgtccttggtattgttggtgtcattataaatttccttagcaaggccggtaaaggcacagaagaggaaaataagaaagcgccacaacctagaccaaatttgcgctcaatgcaccaagcgagccgcacacaaaccactaaaaaaccagaaaaacgcaaagtatctcaaggaacgttcacacaaaataaagaacaagacaaagtaattgctgaacaaaaagcagcacaacaaaaaatgctaagagaaatccgccgagaatctgatgtggctaaagggaaaaatatcattaaaagcactagtagtcaccagaaaaaagcccgtaaattacgtggcagattacaagaagcgataattacgaaagaaatccttgataagcccgtttctttacggaaaaatcatctataaaagcaaacccaagaactagtttcttgggttttttgtttctgtgtcagaactgttacataataacgtcaagttttaaaatgactgtattacaactgtaacattgacctgatatgctgtgtgtatataaaaaaggggtgcgtggattgaatataatagcaacgagaagaaagattttttttgcgtttatagctttaatgatttctttttcagtactatttttgccaacaactaacgcatcagcagctactacatataaaatgacgacaacggctgatgtaaatgttcgcgcagcagacaacaccaaaggtaaagtcatcggtttttacaaaaagggtacaacggttaatttcactgctaaaacaaaaaataattggtataaaacaacatataaagggaaagttggttatgtttcaggtaaatgtgtgactacatataaagcacctgttgcaacaactcaaagttttaccgcattaaataacgaagcaagaaaacacattggcaaacgctacaaaattggcgctactggcccaagctgttttgattgttcaggttacacacaatatgtatactctaaaggagttaaaaaatcaattcctcgtacagcgaagcaacagtatgcctctgctaagaaaattaaagctaaagaactaaaaaaaggtgatttgattttctttaattatggtaagggtgttgcacatgttgggatttatgttggaaacggcaaaatgcttaatgcgcaaaataacggcgtaaaatatgacacaatcacatctggctattggaaaaaatatattgctggatatggtcgagtagcaaatttaaaataattttactgagcgtcactttttagtgatgcttttttgtatgaaggaggagttgggaatgcaatataaaataaaagaaatgccactggaagaactagaacctaaagtagtagaagggcttttggaacataaagaaagattaggttataacattccaaaaaaagacacagagtatattggctttgcggctttaagtgaggtaggggaaatggttggaggagtcacagcgaaaatcagctatggagaattacatgtgtctcttctttctgttgatccaagcacacaaggatcgggcgtggggacagaattgatggcccaaatagaaagatatggtagagcgaatagctgccaccatatctccttaacaacatttagttaccaagccccagaattttatagaaaatgtggttttactgagcttggacgtgtgaaagattttcctataaaaggagaagaaaagtatttctttattaaatatttatagaattacatcgaactatttttctttgcagcagcttgaactgcattgataacagcggaacggaaaccatcattttctagtgatttcactgcttcaattgtagttccgccgggagaagtaaccatatctttaagtttacctggatgttcgccagtttccagaaccgtttttgcggcacctagcacagcttgtgcggcgaatttatatgctttatcgcgaggcatgccacttagcactgcgccgtctgctaaagcttctatgaacatataaacataggctggtgaagagccgctgacgccaataaccgcatccatcaaattttcggaaacgacttctgcttctccaaagctagtaaaaatagctgtcacttctttaagttcttcggatgttacattcgtatttggtgaaacggatgacattgcttcgccgacaagcgctggtgtatttggcatcactcgaacaatttttgtttttgctgaagtgagttcttctaaatcttggatagttacgccagccgctacagaaataatgattttatcaggtgtaagcttctcttttaccgacgttaaaatttctggtatagtataaggtttcaccgctaaaataataatatctgcttgttctacgagtttctcggtatcggttgttatttgtaagccagtaaattccgcttcaagtggttttaatttttcgagattccgaccaccaacaatgatttcttctcttttcactaaattcgcttgtgctaaacctcgaatcattgcagttcccatatttcctgcgccaataaagccgattctattcattctattcgcccctaacaaaattctttttttctattatctcatgttacacggctttgtccagtttttccaagttgcgatagtaaacaaactgtgcgaaaatgaaagcaaattggcgggagggatttagatgaacgaggcaatcgaacgacgagatgatgatatgactatagttagtttcgaagtagaaattagtgcaccaattcaggaagtttttgctttattaacgacaaacaccggactggcgaaatggtttaatgaactggaagtaggcgaactcggagcagatggctatcttcttttcgtcatgacacccgaagaaaaaataaccatgccaattcgtgcattcgaacctaaccaaaaacttgctttcgaatgggaccaagatgaagttgcctttgaactaaatgaaatcaccgcaaataaaacaaggttgactttcacagaacaacttacgactattaccgaacacagtccaagagatatttccggttggcatatttgcttgaagaaattacaagcgagcgcagaagggaagatatacgatttcaacaaaacggagttcaaaacgctcttcgccaagtatcaaaaagaactaaatattgagaaataaatcttttagaaaagccgtaaatgaagccaagaaagctttgtttatggctttttttttgtatgaattaatctttttccactttaactggaaattccttatgttcaaaaaagtaatcggtttcattagaatgtaattgtaagcaaggcattgaaaaaatacggggtgacgaaatgatagtatcagaagaacaattatttttaaatcagcatctaagcacaaaagaagaagtgctagcttttattgcagacaaggcggctgaaatcggtatcacgacgaattcggcacaagtggagcgtgacttatgggcacgcgaaaaagaatacgcaacagcagtacaacaattaatcgccattccacatgcgaaaacggaggcaatattggaagcgaaactgcttttcattcgtctcgttgaaccgattgattgggagtcaaaagaaggctttaaggcacaagccatttttgcaatattagttccagcaagtgaagccagccagcagcatctgaaaattttatccagtgtggctgtgaatttactagaagaagcttttcaagaacaaattttaacgattaaaacggaacacgaactgatggattacttgaaagataatttggaaggagaattgatatgaaagttgtaggagttacgtcatgtatcgcaggacttgcgcacacaccaatggcagcaaaggcattagaaaaagcgggagtaaaattaggccacgatgtcaaaattgaacaacaaggagcaatggggacaatcgatgaaatcacgccagctgaagtaagtgcggcggatgtagttattatcgcggcggataaagtgattgatggggaagatcgtttcaaaggaaaaccagtcgttcgtgtgaaaattggtcaatgtgtcgcgaacggggaagcggtgttaagtaaagttgttgcagcaattgaagcacgcaaacaaaaggaggctaattaagtcatgaaagggaaattaaacgaagcaaaagaccatttaatgtcgggaatatcgtatgcactaccggtcattattgcagggtcgcttgttgtagctgttgcaaaattaattgggattattggtggcgttacaaatctagatgcttacgctgacgcaagtggattttatcattacgtttacttatttcaaaatgtaggttgggcggcaattggcttacttaacttagtactcgctggatatattgcttattcgattgctggaaaaccggcgcttgctgctggttttgtcggtggggtcttggctacaagtacaaatgctggtttcttaggtgctgtggtcgctggtttcttcgccggttggttaacaaactgggtgaaaaaacatgttcgtatcactggaccggctgctagttctttaccgttaattattttgccacttatcacggttggtgccacggggatactgatgtcacttattctcggcggaccgcttggatggttaaaccaaacgttacttgattgggtaacggaaatgtgtaaaaacgatacaaacgttattattctagcacttattttaggagcaatgattggatttgaccttggtggacctgtaaataaagctgcttggatggctgggaatgcgctatttatgagtgggatttacctaccttcgattatgattaatgtcgcaatctgtattccaccactaggttacggaatcgcaacacttttacgcaaaaagaattattctactacctttaaagaagctggaaatggtgcgctaattatggggctgattggggtcacggaaggtgcgattccatttacactacgcagcccgggtaaattaattccgctaaatgttattgcctgcgcgattggtagcgccgtaacaatgggacttggcgcttatgtgaaaatgccgccaatcggtgggatgtatggtttcttcactattggtaacggctgggcttacttagttggtggtctagttggagcgtttattatcggaatttgcgctaacttattcgttaatttcaccgaagaagaaacagctgctgcggacgacgttttggacgatatcgatattagttttgacgaaatagagattaaataatagttggaggatttaattaaaatgactaaaacgaaagtacatgtaattccgcattcacattgggatagagaatggtatttcacttcaagccgttcaacaatctatttagtgaagcatttaaaagaagtaattgaaactttagaagcgaaagaagattaccatttttacttaatggatgctcaaagttctttaatagaagattatttgcgctactgcccggaagataaatcgagattagaaaaacttattgctgaaaaacggcttattacggggccttggtatacacaaacggatcaattagttatttcacaagaatcgattgttagaaacttactttatggtacgagaattgcacgcgaaatgggacatagcatggctgttggttatgtcccggatgcattcgggcaaggcggaaacatgccgcaaatttataaagaattcggcatttcgaagtttctattttggcgcggggttgcggataatcgcttgaaacaaaccgaatttatctggcgcggtgatgacgggacggaaatgctagcggaacaaattccattcggctactactacggagcgaacattcctgaaaatgaagccgaacttaaaacctatttggatgaacaaattggcgctctagaagaaaaagcttcaacgccaaatgtctatttcccaaatggcttagaccaagcgccagtcagaaaaaatttgccggaattggttgcgaaattcaatgaattagatagcacgcgggaataccaaatcgcttcaccagaaacatttttcgcggatttagaaaaagatgtgaccgatttaccagtcattgccggcgaattaacagaaggaaaacatagtcgcctgcataaatcgattttctctactcgagctgatttaaaacaagcgaacaatcaaattgaaaactttttaagcaatgtgctagagccagttctttccatcagctactcacttgggaatcgctacccacacaatgaactcgcagaaatttggaagctgatgtttgaaaatgctgcacacgatagcattggtggctgtaatagtgatacgaccaaccgcgacgtcaaacatcgttacaaattggcttcggatttagcgaccaatttactcgatttaaacatgcgcctaatcagcgaaaaaatcgaacaaagacaaccgttccaatttaccgttttcaacccacttccatacgaaaaaagtggcgttatcaaaatgactgcgtacattccagaagacaatttcacagtagaagatacgcaaggaaacacgcttgaatacacaattctagaaaaaacagacctaaccgaatacgtcttaaatcaacatatcgatctaaacccaagcagacccgtttatttaccagaaaaagtctttttagcaacgatgctagtaaacgtaaataacctgccagcgctaggatatgacaccatctactttaatttagaaaaagaaacagcagagcaagaaccgacacaatccgccgcgacaaaaatcgaaaacgaattttatgaaatccagttagcagccaataattcactaacgattcatgataaaaaagcgggcagaacctacaccgatcaaatgatttttgtggaaaatggcgatgatggcgattcgtacaactattctccgccacgaaaagaccttgtaatttcatcgaaggaagcggtagtggaaagcatagagtctagcatatcaagcgtcaaccaagcattaactatttccttcaagttaaatgtaccgtataatttagaagaacgtgcaaatggtgaaaaaaataacgaaatgattatcaaaactgtaatttctttacgtaaaaacgaagaactcattcgtttcgatgtacaaatcgctaaccaagtattgagtcatcgtctatgcgtgacttttgcaaccgaaattgctagtaaattctcgacagctgaccaattattcgcgccaatcaagcgtccggttcgtcttccagaaatggatgtatgggaagcagaagaatggcaagaagcgccaatttcgattgaagcaatgcaaagttttgttagcttacatgatgagtcgcacggggttgctgtaatgacagaaggcgtgcgcgaatatgaaatcattggcgaaaattacgatacgatttcgctaactctgttccgcacatttagccacatgggtaaaaccgatttactatatcgtccaggtagggcttccggtgaatcaatcgttgcgacaccagacgcgcaactacttggcgaaatcaacgcaacatttgcgctaactttatttgaaagctcttttgatgaagcaactatcgcgaaaaaagcaaaagaatatctatcgaacccgcaagtttaccaaatgtctgattttctaaacggccgcttgatttatgtttaccgcgacgaagaaaaaacactggatgcgacatatagcctggcacttccgacaatagacggagcgattattagtgcagtgaaaaaagccgaagacagcgatgccttcattacgcgttttttcaatccgtatttacaaaaagaactcatcattccagaagttttccaaggcaaggaacgccacttggatgaaagcaagtcaaacgagaaacaaacgacattaaaacatgccaaagtacaaagctatttatttgaaaaataacgattaactacctaaaaaaaggagctgctaataatgggatatttcgcttataaacgtttggaaacactatatggcatgctccttgatgcgggtagccatttatcagctcagaaactcagccaagatttacatatttccgaacgtacgatacgaacggacattgctaaactaactgaatttctcgaaagtcacggggcaaccataacgcttactcggggtgcgggttacaaaatcgaaatccttgatccgaccgtttttcaagcttttcaggccgaaaaaaataaaccgaaaaacgctgattattttgacttagataatcccgaagaacgcgtgaaatatgagattttcttgctgctatcaagcgccgactatattaaattggaagacttggcggatacgatttttgctagccgtgccaccatttccaatgatatgaagcaagttaggaaggttattgcgtcctatgatttaacgctcgtctcgaaaccaggtagcggcgtgaaaattgtcggcgatgaagaaaaaatgcgctacgccctaaccgcgttaattgcttccaaaaacgccccagaatcttacttagaatcatttttcgaatggcataaacaaaaagataaactgcaaaaattaatgacagccgtgaccgattatttttttgcgaccaacattcgtttcacagacgaagcgcttcaaaatttacttttacatatgatgattttagtggaacgaattgaattcgggcatacgttggaacagtttgaattaacggacgttagtgaagaagaaatcctgattgcagctaaactggcaactattttagaatcacttttcgaaatagagattgcggacgcagacaaaaattatttacttctccaaatcgctagcaaacgaatcctgaatgtagaagataaagaaattagcgaatttgatgattatgcgtatatcgaaggcttgttgaaccgcattgagtcacattacttttatcatttacaagatgacatgcagctgaaaaaggatcttgttgcccatattcattccatgttatatcgcgtgaaataccatatgaccgtcaaaaacccaatgacggagcacatcaagcgctattatccgttagcttacgaaatcacgctcgacgcagtagaatcgctaaaaaaagactatccatatgacattaatcaaaatgaattagcctatttagcgcttcatatcggggcatctttagagcgaaattatcaaatctcttactatcggcataaatcggctttaatcgtctgtgggtcaggttttggaacggcgcgaattgtggaagcaaaagtgaagtcggcagtgagcaatctcgacattacaaaagttgtttcgattcaagaatataaccgttttattcatattgaagaagatatcattctttccaccgttagaatacctgagaaaaataagccggtcatcaaaatcagcaacatcccaaccaatgaagaattaaaaatgcttggtgccattattcaagaacaaaccgatcctaaccgcggctttctatcgaatttcttcacggccgatttttttgaaagaagcagtatgacaaacaaaacagcaattttagaagaaatggttgactcattgcgccaacaaaatattgttggcgaaggcttcttgcaatcggttcttgaacgtgaaaaactaggctcaacggtactcggaaccggaatagcaatcccacatccactcggactaatggccaaagaaacaaaaatcgttattcggatattagataaaccaattaaatgggatcaaaaacaatccgttcgcgccgtatttttactatgtattagcaaaaatgattatgaagaagccattaatatttatgaattgctagtagaattagtacgcgaagaatatggtgagaagctttcaaggctttccgattttaatgcattcactgctttagcaaatgatattttgaagaaaaaataaaggctacctcctttttaggaagtagccttttcgtgaatttttcgtgaattttaccatttttcgtttagtgaaagtttatttcatggtacactataagaataataactaaatatatggaggatttaatgaacagacaaacagaatttacattacttattgtgggagcttcgttaagcattttaacttttctaggtgctatgttgtataccattatttttggacttaatacgctaatggtggctgatacttttggttattatagtagctcagaagaaacgattttacttgggataattactttcttttcagtagttgctgcgttttttgcactaggatcagcggtttttggttttatcggtgcatttaaagtcaaaagtgacgggccaaaagtaaaaacattaggcgtttgttttatcgttttgggtggattacaagtattcactattcacggaattttatttttgattgcaggaattttaacaattacaaaaaaagaatacaaaacaaattctaaagaagatgaggggacaaaatgggaatgatagcgttcttaccaatattttttatttttgcgatgtttttaggactagcagcaaaagcccttttagcaatttggatttataaagatgctgaacaacgcggaatgaatgcagttctttggtgtctgttaatggttttcatcaatgtcattattattcttgttatttacctgatcgtacgtaataaaggggaagtcatgaaacaaaatttaggactactaattagtggtattggtattgcggtactaaatacattaatggcgattattgcttttatttttataatctcttttgcagttagtgatggtggaatgcataatatgatggacggttataactatgattatgatgacgggtatgagtacgatatggataattttgaagatttttaataacaccaacgagaatctgctacctaatataggagcagattctttttatatttgtataaaaggggtatagacaataaaaaagtgaatctcgacaaggggaactgctgaatggatacggttattttaataacggttattatcgttatagtggggttagcgtttgattttataaatgggtttcatgatattgcgaatgcggttgccacgagcatttcaactagagctttaaaaccgcgagtagcaattggtattgcggcagttatgaatttcctgggagccatttcgtttaccggagtagctgaatcgctcaccaaaagcattgtagatccattttcgcttaataatggggaatttgtcgttttatgtggcttaatagcggcagtgatttggaatttaatgacttggcttgttggaatgcctagtagttcatcgcatgcgcttatcggtgcgatagctggggcttccatcgcatcagccagtagttttagcgtgcttaattggtcaggatttacaactattattattgcactcattatctcaccaattatcggttttacagtcggttatttgatttattcgctctttaagcatctttttcacgacaaaaagcttgggaaaatgaatcggcgctttcgttttatccaaattggaactgctgcagcccaagcatattcacacggcacaaatgatgcgcaaaaaacgatggggattattacgcttgctttagttgcgagtggacttttgaaagagtcagccggtattccattttgggtgcaagtaagttgtgcagcatcgatggcgattgggtcatctgttggcggttatcgaatcattaaaacagtaggaacaaaaatcatgaaaataaccccagttactggtgttgcatctgatttaagctctctttccgtaatcatgacagctactttgattcatttgccagtcagcactacgcaagttattgacagctcgattatgggtgtcggaacagctaatcataaaaaagaagtcaattggcgtacggggaaaaatatggttgtaacttggtttattacgttaccactagctggacttttggcagcagtggtatactggatatcagcagctatttttttataataaggaggattttaaatgaaaattgaacatgtagcattatggacaactaatttagaacaaatgaaacaattttatgttacttattttggtgcaactgccaatgatttatatgaaaataaaacaaaaggcttcacttcttactttcttacgtttgaagacggcgcgagacttgaaattatgagtcggacggatgtaacaggaaaaacaactggggaaaacttaggatgggcgcacattgctatttcaacaggaacaaaagaagcagtagatgagctaactgaaaaactaagacaagatggttttgcaattgcaggtgaaccaagaatgacaggagacggatactacgaaagtgttgtgctagacccagaaggcaatcgtatcgaaattacgtggtagtattgatttgctaggaacttatttatcatgtaatatacggagtacatactacaaatgaggtgaattttatggatatcgtaactaataaaattgtcgtagaaaagtataattttgaaacaatcgtggaagaaaatgagcaattcgaaaacaaaattgaattagaggtccatgaagtcgagccggtcaacggaaatgtagaacttatgtcaaaaggaaaaatttttaaaataacaattccttttttattagtccttgaaaatttccggattgacggtagaatcagccgtattattcaattaaaagacttttttggagatttttccgatttagaagctgtagatgttgaaggcttatccaatccgctaattgactacatcaaacgcttaacatatgatgtaacagaaatcgcgtttgatgagccaggagttagcttggattttaacgctaatcataatagctagttaggagagaaaatgcgtcaatatatgaaaatggtacgtccatttgattttgtaattattattttactaatcttgggttcgtttttaccactaatattattttctgtcgctgaagcaaaacatgtgggcgatgatgtcgtagcgattatttcacaagatggcaaagtaattcgggaaatcccgctaactggtcataaaggcaatgagcagtttacgattaaaggaaaaggcgcacaatataatttgatggaagtagatggcgaacggattcgaataaaagaagacaacagcccagatcaagtaggcgtcaaaatgggttggaaatccaaagccggtgacaccattgtttgtttaccacataaagttttcgtagagataaaatcgacaaacaaaaaaagcaaagaccccgatacagatttaattgtgccgaattaaaacacactaagtgattagtgtgttttttttgtttgaacaactaatttaaaaattattgtcaaatttatgtcacatgttttcattgtcgctgcttatgtatctaagaaacagaaataagaagcggaaatttgcatattaaaattagacaactacttcaaagtaaggtgttacaatcaataagctataataatgattctaatttagcttaatgaaaggaaagactaatatgaaatctaaaaataattatttcaaacaaatcaccaccataatgaccgtcgtgagccttttaattatggtgttaggtattcaaggtaataatgatgttaaagcagcgccacaggtcgcgccaccagcatcaattaatcaaatttttcctgatgcagatttagcggagggaatacgagcggaacttcaaaaatcaagtgtcacagatgtagtaacgaaagaagaattagaaagcatttcgcaactgtcggtatacgcgaaaaaaatagcttctattgaagggcttgagtatttaaccaatttgaaatttttaaatcttaatggaaaccaaattacagatctcagcccattaagcaatttaacaaaactaacggaaatttatattggtgataataaaatttctgatattagtccgcttcaaaacctaactaatgtgactgacttatatctagtagataatgatattagtgatttaaggccattagctaatttaacccaaatgtatagtttgcgtttgggaggtaattcgaatattagtgatttaaacccagtgcgaaatatgacgcgtttgaataatttagaagtaacagggtctatattaaaagatttgacgccgctagccgatgtaaccagcctaactcgtttaacattgagtgacaatcaaattgaagatttaagtccactagctggcttgacaaaattggacaatatagcagcatattcgaataaaatcactgatattactcctgtgaccaatttaacaagactccagtatttggatttaggtagtaatgaaatcactgatttaagtcctgtggctaatctgcaaaaattaacctcgctacatcttgcaaacaaccagattactaatattagtatgcttgaagatttaacaaatttaacttcgttgggtttacaaaacaataaaattagtgatatatccgttttgaaaaatctaacccatgtgacttatttgcagttggggtataaccaaatagtggatgtgaaaataatcggaggactaactaatttaacaagtttgcagttaacacaaaaccatattactgacataagtcctttagccaacttaaccaaaatacaatactctgacttctctaatcagatgataacaaatctagaacgtaatttttcgaagacactctccgttccgaacaatataactagcatagatggaacgctaattgcgcctgaaacgattagcaataatggaacctacgacgcaccgaacttgaagtggtctttaccgaactatttaccagaagttaaatatacgttcagccaaaaaataccgattgggacaggcacaagtaattatagtggcttcataacacaaccgttaaaagaattactagattacaaagtcacatttaatgtagaaggtaatacaagtgaagtagagactgtaacagaagaaaatctcattccagaacctacgagcccaaccaaacaaggttatacatttgatggttggtacgacgcagaaacaggcggaacaaaatgggacttcacaaccgggcaaatgcctgcaaatgacctcacactatatgcccatttttccgtaaatagctaccaagcaaattttgatatagacggtgtggtaacgaatgaagcggtagtatacgataccttactcaatgaaccgaccactccaaccaaacaaggctatacatttgatggctggtatgacgcagaaacaggcggtaataagtgggatttcaaaacaatgaaaatgcccgcgaatgatgttgctttttatgcacattttactatcaacaactatcaagcaaattttgatatagatggtgaggtaaagaatgaaacgatagcatacgataccttactcaatgaaccgaccactccaaccaaacaaggttatacatttgatggttggtatgacgcagaaacaggcggaacgaagtgggatttcaaaacgaaggaaatgcccgcgaatgatgtcactctatatgcacattttaccatcaacaactaccaagcgaactttgatatagatggggcagtaacagaggaagtagtaaactatgacgcgcttattcctgaaccaacatcaccgtccaaaacgggatttactttcgaaggttggtatgacgcagaagttggcggaacaaaatgggattttaaaacgatgaaaatgcctgcgaacgatattactttgtacgcacatttcagtaaggaaacaccaattattcctagtccagatgaaggattagactctgattctaccaatggaccaattactataaatgaaccgagtgctactagtacgccatcccaaaataataacatcacagtaacagcaggggaaaatactacagaactagcaacagctaaacttccaaaaactggagataatgccccgtggaaaacattgtttgccgggatattactttcatcatccgcgttttatatttggagaaaaaaagcataattaaaaaacccagcattttctaaaatggagagtgctgggtttttggtttaatcaagaatctcaatatagccttctgtaccattgatgcgaatttgctgaccatcttttataacggtagttgcattttcgacacccactacagcgggaagaccgtattcgcgggcaatcactgctccgtgcgtcataagcccgccaacctcggtcacaagccctttaatagatacaaatgcgggagtccaactagggtcagtataagccgtaactagaatatcgccatcttctaaatccactttttccatatttaaaatgatgcgagcgcgaccttcaactgtcccagatgaaacaggaagtccaagaatggcatctttatggagattttcgcgtttgtatttgccgttaatcatttccccatcagaagtaaggatgcgcggtggtgttaatttttcaaaagtggcgaaatcgcgttttcgagcgttaataagttcgtaatcaacatgaccagtacgcacaacttcccgcagttcctcgaagtaaagaaaataaatatcttctttattttgcaaaacgccattgtttacaagttgttcgctagctcgaaggaaagccagtttataaataaagtagcggttaatcatgccgtattttggatactcgcgatagccaatgaaatgacgtaaaatatcaattttttcttttgtttccatcgctttttgttccccgtccggcagttcttgcaagcgccttaggatttcatgttctttatcgaaagcttctttttctccttgagcaaatttgtgcatactcgcgccgggttcaaagtttttgatattacttaaaatcaacggaataagcgttagcgggttttcaatccaacgtgttttagttaagtcaatttcgcccgcacagcgcattccgtatttttgaagatactcttctaatgcttttctggtttctgcaccaccatccaaagtagcaagctcatttaaaaaatcaggatttttcgtttgttctaaataggctctgacaatagggtaggggcgaatgacgtcagctacatctaataattcaagtcccatttgtgaagtaatattgtttggtgctgattctgacagtttatcggcgacattttttctcccagccactggtaaatatgttcatttaaccaagctgaagcgtccataccggccataatagcatcaatactagtaggattaaataaaactctttttaattcttccaaatcttctacgataaaatcaaacaaatcggatccgtttttagtttcaatggtttgcttcaaggattttatggagttttcgctgttttggactaattcaaaaacgctagatggatcaggaatgccacgaacgggtggttttccagaaatgggtgcttgatttggattttcctccgttggtagtggaggtaggaatccttttttattaattacggtgagtaaagcatctttaattagcgggtccgattggccgagggaattcaccatcatatctcgagaaactttggctgatagactttgagtaatatcgacaaataaccgtcctcctgcagtatacattgtggctggagtggtcattaaataaaaggaaagcccaagtggtttcatcgcatcagtcatcatttgctgatgtgcaacagaaatataaacacgattgccgggttcacttacttctgggattggatataaagtcgtgataggccgactctgaacaatgtaaaaaataccttgtgctaaacaccattcaatatcttgtggtttcccaaaataggcttcgatttttctaccaagtttagcaagttgtaaaatttgttggtcggttaatgtttgcttggtttgctgtgatttttcaagtgggcaagtctctgttccaccttcttttaaactataaatggcgagttttttcgtagcgattattttgttggtaatagtattttcttggactgtgtatgagtcagcggaaactaaaccagaaacaagggcttcacctaacccaaaactggcatcgatagagagggattttcgattagatgtaattggatcagcggtaaatagaataccggatgcttcagggaaaatcatttgttgaataacaacggcaagctggactttatggtgatcaaactgattttggatacgataaataatagcgcgttcggtaaataacgaagcccaacacatactgatatgctgtaataatgcatctctaccaataatatttaaatacgtatcatgttgccctgcgaaggaagtgtggggaaggtcctcggcagtggcgctagaacgcacggcgaaaggcatctcataccctcccacatctaaaagtgcagcatccatatcactcgttatttcagaggggatttgtgtatgttgaataagcgttcgaatcgtttcgctgatttctcgaatagcatccatgtcacttgtttttagggaagaaaggcgttggagcagttgcgtaaattcattgttttccgctaaggttcgcttgtaagcctctgttgtcaggcaaaaacctgcgggaacatgtactccttcgatattagaacaagcacctaaattcattcctttaccaccgacaagtgcttctgaatgcggctgtatttcttgaaactttagtacatatggtttcatatagttatcccccaatttttttcgaaaaataatacttgactgtaaagaactacttattgtataattaaaatagggattgctttaaataagtatattttaacgatattatctatctaaatttaccacgaatctagcctaaattcaattaaaaacaaatagaaaagcaaaatttctcatgacaagaaattttgctttatttttattgttcaaatttacataaagttaagccttgtgcctttgcttgagcaactgtcacagccgtttcgccattagagttatttaagccgcgacaattttgatcataatgatatcttttgccagtagcggtgatataaaccatttgtccttgttcgttactcgtgtccggttgtgcagcagcagcttttgagcgttctgctgcaactcgtttttcttcagctgcttttttctcggctgccacacgagcttcttcggctttcttttcagccgcgatttttgcatcagctgcgcgtttttcttcggcagctacacgttcacgttctacacgttcggcttcagctttttccgctgcaactcgctctgcttcagctttttctgcaatttttgtttcgtaagcaggggttagtgctagtttaagcgtttgttctttcgtttggccatcaatgacaatagaaagaacagcatcttgtgctttatctagttcatttacagaaagactgaaagcaccgttctcatcagctgtagtcacggcgtcaggaatagcaacgaaatcaagcgttacttctgcccctggatttgttttcccttctactaccaaagtaccttcatcatctgttgtaaaagtcgtttctgcttttaaaacaggtgtattatcaactttctccgttttttcttgttgttttgttggttcttcagttgaggcttcctcgtctgtagtcggaataattccgacaccaataataatagctaaaatagaactaataataataatttgtgtttttttacgaggccaatttttccttctaaagctcacaagtccaaaaatcaacacaccaatacctactagaaacaataaagttcctaatcccgtcatatacatctccctctccctttttatctaacaaaattattataagcgtaatgtgagttaatgcacaagttaaattagctgttttttgtactttttacaaagaaattcaatgaaaatgttcggaaaatcaaataaatgataaaaaaattacatcttttgctaaaaaagacagtagttgtctaagtaaatggaaattaatcagaatgtcgagattagagaaattagctagaaattcaacatagcgaaaggaagcgtattgctgaaaaggataaagaggaagcagcttgaataatccgattgattgctttatgatgaaggaaagacaagtgctttggaggtgctagaaatggcgaaaccgatagaagaaattggtgaagaaatcggagcaaaggtagagaaagttgcacggaaaactggaaatgttgctggaacggcagctaagctatctgtttatagttccatttgggctgtaaaaacaggcgtaaataagactcgtgcgtttgctcaaggctttaaacaaggctggtctggtaaataaaagcataggaaaagggagaacgtgaattgttaaattacttatcgtcactaaatccggtactattagcacttcttgccggaattttcacatgggcttgtaccgcagcaggagcttcactcgtatttttctttaaaaatttaaataaaaaatggggcaatataatgcttggttttgctgctggtgttatgcttgcagcaagtttctggtcgcttcttgcccctgcaatcgaaatgagtaaagatttagggaagttttcctttgtaccagctctagttggctttttgcttggggggatatttttacgtgttattgaccgtattattccacatttacatttcgggtttccagagcaagcaaaggaaggaccaaaaacttctctacggaaaagtatcttattggttctttccattactattcataatattccagaaggggcagctgttggggtagctttcggagcagttataactggagacacggagacacttattacagcaatcgttttggcgcttggtattggtatccaaaactttccagagggagcggcagtatccattcctttgcgcggagaagggctctcgagaggaaaaagtttctggtatggtcaactttcagcggtagttgaaccaattttcgctgtaattggtgctgtattggttgtttttgttacacctattttgccgtttgcgcttgcctttgcagctggtgcaatgattttcgttattgtagaggaattaattcctgaatctcaagtagaaggttcggccgatttagcgactgctgcaacgatggcaggatttgcagtaatgatggttttagatgttgctttaggataaaataataaactgaacaaaaaaacgacatttaatatttgcggaatgcgtttttttgcggtaaaattgatagtgaaatacttcacaatatgttagttttcaggggtaatcctgtaactataaatcggacacggtaaaagctcccactttatccgtgtcttttttgtgacatttgttaagaaatcgttggtccttttttcctattttagtacaaaaactagaaacttgccttttttcatgtataattgttttataagaaaagctggggaaggtttttctgaggtgaggtgcataatgtgaaaattaggtggattagactttcactagttgccattctcattattgccgtggtttttattggtgtaataggtttccaaaaataccaattttcaaagtcgcgcaacaaagtaataatgcagatggacagactaatgaaagaccaggatggaggaaatttccgccgcttggataagaaagaaaatggagtggaaatcatttcttacattcctaaaacaactgagaaaaaagacaacgaaattatccaaaaagaaattggaaaggccacagatgcagaggttaaaaagttaaatagagataaagaaactcaagggattattttttacacttaccaaaagcatagaatggccgagcaagcaatatcttacaaagcagttcaatcggagtacgtaaaagaaggaagaactaaatttgtactcaaagataaaaaagatatttgcaaaaacatagtaaccgacgcagaaacaggtgctttgttaacacttggggaagtattaataaaaagtaatcaaactaaattaaacttaaaaacagctgttgaagaagaattgattaaaacaggggatttttctttaaaagatgttggtaatcttgggaaaattaagagtttagtgaaatggaatcaaacggatttcgaaatcacgaactctgaaattattttgccagtaaaaataccaggtgcaccggaaccgaagaaagtaaaagtaaaacttgctgatattgctagttctgtgaataaacgctacttaccaagcagtgtgaaagttccagaagtgccaaaagcaaaaacgaacaaacgaattgcccttacttttgatgatggtccaagttcctcggtaacaccaggcgtacttgatacattgaaacgccacaatgtaaaagcgacattctttgtacttggctctagtgtcatacaaaatccaggtttagtaaaacgtgaattagaggaagggcaccaagttggcagccactcatgggatcacccgcaattaactaaacaatcgacacaagaagtgtacaaccaaattttaaaaacgcaaaaagcagtatttgatcaaactggatattttccaacgacaatgcgccctccatatggtgcagtaaacaaacaggttgctgaagagattggtcttccgataatacagtggtctgttgatacagaagattggaaatacagaaatgctggtatagtgacgaagaaagtccttgcaggcgcaacggacggagcgattgtactaatgcatgatatccataaaactactgctgcaagccttgacactacattgactaaattaaagagtcaaggatacgagtttgttacgattgatgaactttatggcgagaaattgcaaattgggaagcaatatttcgacaaaacagattcaagaatggtgaaataaaaatcagtagctaagatgagttaatcattttagctacttttttcatacgaaatgtaaagttttctttacgtaatgctgtatttattttataataactgtaaatacttcttatttggtggtggttaattgaaagtccgtaataaagtgaaacagttgcgtgaagaaagaggaatcgggcaaaatgaattagctttagcattagaagtttcaagacaaacaatccatgctatcgaaaaaggtaaatataatcctagtttagagctaagtttgaagatggcacgctattttcgtttaacaatagaagagatttttcaactggaggagaattagcatgaaacgatatatcattaatcgaggtattatggttgcagtagttattatatatatgtatccacttttaggaataattaaaggagaaaaaatatttggagatatcggtacaccaattattatggttattgcggctttaattggtacactgagttctgtattcttatctgaagaaaaaacgaagcgagaatatgagaaagaaaaattagaaaaagatgaaagatatatcaacaatcgcaaaacattttcctattatttgcttattgttttagctttgacgataccaattgtgttgattgttcttaatttatatgggattgaacaaatatccatttcaagtttgacaatcatttttcttatcttctgctttgcatatatgattgtactggaaattattcggaaaaaagtataattttaagcaaaataaaaaacatccaactttttcgttgcatgttacctagcatttaccaaattttggtgacaatgccataaatactattacgtgtaatccaaccattcacgtgtttgtgattattagaaatttgatattgcttaccgcggattttactgattttatgtgtaaaaaagctaccgcgaactttgcaaaatacgatatcgttgactttgagttctctcatgccaatcggttctaaacgaacaggttgcatcgatttaatcaaaggtaacatcgaatttccgccttctttataacgctcaatggtttcgccacgtctgagtatttctactgcatccaggcttctcatagttatgctcctttcttgttgttagtgccagaataacaaaatagtaaagcgaagtcaacgaaatttttcgctgacttttttattttggaggctgacggcggtttgtgagttgaataatccaaccagcgattgggaaaataataaataaaatggtggatatttgtggagcgaagaaactgataataccaagtgcaataacaaatatgaaactagagattcgaaacttccaattgtcgatacctgaatcttttccatttacagcgtgatgcaataattggaatatcaccgaagtaatcaaaatagtaataacaaacccaataattggtgcggtcatatctggatgttgcatgattgctcttgtaaataatggaataagtgataaaactagtaaaaataaaatattaaataagacggcagatgtggaaatgaatgtgacttgatcgaacagcctgctatgtgaataccaaaattgtccgatgattaatccgccttcgataaatataaaaatttcccataagaatgcttgtgtgctagctgcggtaaatacatccggtaaagtcattcctaaaacaattatcgtaattataattgcaaatacaccatcactaaatgcttctaatcttccttttgacaatgtttggctcctcctttcgtgtcttgttttttatgatatgggttaatatagtatagcatattttataagcaaacaagcagtagcaatgtggcgcgaaaaaaatctgatataatagaataaaattaactttaaaaggagtttaaacagatgattagagcgatttctgtagatatggatgggacttttttagatggaaatggtgaatatgatcgtgctaggtttgagaagatttatgcagaattaatgaagcgtgggattaaatttattgttgcgagcggcaatcaatattatcagcttaaatcattttttcctggcaaggatgaggagcttttttatgtggctgaaaatggggcggttatttttcatcaaggagaacttcggagtgtgaatcgttttgatgaaagattagttcaaaagattttgtggacgttgattcaagattatcatgatttgcaagtgattctttgtggggtgaagagcgcgtatttattaaaagccgccgatccagattttaaagcatttgcgaaaaagtactattttgagttacaagaggtggagtcattcgatgtgcttccggatgatacgtttatcaaatttgcgcttgatgtagaagtggctaaaacagggcaaattgtcgaggatttgaatcaaacgtttgttggcgaaattcgcgctgtgtcgagtgggcatgggagcattgatattattattccgggtgtgacgaaagggaacgcgattcagcaacttttgaatgaatggcaagtggcgccagaagatttgttagcttttggtgatgcgaataatgatatcgaaatgttgcaactaacttcaaatagttatgcaatgctagaaagtagtccagaagttcttgctgccgcgaaacatgtggctccttctaataaggaggcgggcgtgttacaggtgatagaggaatacatgaaaaaaagccaaagattttgatccgatctttggctttttcgaaagtggtaaacatgtcggttatacactaaattaattaaccagtgtagactctacaatatcctttcgtcggtaaacatttagaataagaccgagtagtgcagcgtaaactagtaacatgcttcccccgtagctgataaatggtagaggtactaccatgattgggactattccaagccccataaggatgttccaacaagctggaactgtaaataatatagcccctccgattgttaataatctgccgaataaatcctttgttttaaaagcatttcgtgaaatccgcaatataaatacaaccagtagtaggcaaaggaaaattccgaatacccagccaagagaatagacgagaaatgggaagacaaaatctgtatgtgcttcagggagtattagattgttgtgaagtcccttgccgaaccaacccgcttttgaaagaatatctttcaaaggtatgcttgtatcagggagatagctactagggtatttaagaatcatcgtactaatgaagataacacctacaagcaaattacccagtgctactttaatggcaaatcgattatgacgataataaaaaatatacatcactaatacacacaagaagtacataatactaaacacaaactgagggagcatagtgtagaaaataactgggagccaaaataggattagtagcattacgagttttttccatcctttaaacgcattagcattggtaaaaataccagcccatgcgatgaagaataaaaataaggagatagctggactatcaatcgcaataccccagagagacatccatcttcctcctccagtaagcggaatgccaactaaaaaagttgtgaaaaataggatcaaggcagccgcgtaaaaatacatccacaaatcttttagttttctataatcaaagaaaagaaatcctatcagagcaagaacagcaatggcgagccagacaatttgttttttcatgaatgaagaattagatgctactacatcacctattattggaagaaaactaatacccgcaagtaggataaataacgcaataaggagccaatccattcttggtttatgaagctgattcatgtttctgccaacagtcgagggatctcccatttcctgcatcgcctttttattcgcatcctctatagataatcctcttttttgaaaggagtgacttagctcttccagatgattactaagctctttttttatcatactgtgggcttgtttggattttacattagctataactttacctaaatattcttcaaatgtagaagaactcataaagaagcctcctcaattaaatttttcagtgatccgtgttgcttagagtctcttagttcaaaagttgctacaaattttttccctttcgcagttagggaataatatttcttaccttctatccattttgatgataggattttcttgttttcaagtagatgtaacagaatataaagctgaccttcattgtttttaaagctaagttcatttttttgaaatagttgggtggaaatttcgtacccatgctttgcttcgtcttgcagtgcatctaatatgttttgaagtgtttctattttccaagaatgaagttctaagtgtgattgtttcttccggattgttttttttactgcattttttctctcctcggaaaaagaaaaactctcaaaatctttttttatagaatcctttaagttatagaatggatcatccatgattaaacctcctttttcatcttattctttaataattctctggcttgttttaacctggtttttaatgtattgctatttacaccagtgatcttactaatatttgctaagggaagttcttcgtaataatgtaagaaaacaacttccctgtactttacgggtaaatccataacagcgctcattaagctgtttgctacatcttttgcgataacttcttcttcaacgtgttttgacttggacgggagatagtcccaaattttatcgttgaaatttagtttgcgataatgccaactacccaagtaatctttgcagtgattaatagcaattcgatatagccacgtttttatggatgacttattattaaactgatctagcttttcgtagcatttaataaatatctcttgcgttaaatcttccgctgtcgttcgattctttacataagaaaaaactagatgcagtacatcatcactgtagttatccattaattggctgattatttgttcggtattttctatgctattaatatgaattcctatttcttcaagttcagtcatttaagtttcaccttcttctgcaatattagacgaagcaagtatcatttgggtttggaaaaattttatttatatccctaaaatagtgatagtcatcttataaagtattaactatctgttgaaaatacgcaataaaaaaaagactgtagacaaaatgattgctctacagtctttgatttgttctatttcaataaactaagaaatacgacgcccaccatgattaacagtataccagaaaggataaaagtccattccagcgggctttttttctgtttgaaaatgaggataccgccgattgttgcgacgattacgcaagcttgtgatatcgagaagctcgttgcgacaccgagtacagcagtcgctaagaacatgcctaaattggcgattgaccacgataatccggtcattaagttaaatgtaacattttttcgggaaatagcagtctttttcgctaagttaataccaatggcgcatgtcagcataccgatagcttgtggtaaaatgatagaaaagccagtgacatcaaaaagctggtttgttactacgtaaagcgttaaaaagaaggaagatagaataacgataccgtagacatgaaatgaaaccgactccgtgatatgattcccgcgtttttgaaacccggtcattaccaccccaatcaagattaaaattactgcaacaactccaatgataacagccgtaaccgtttgccattcgcgaaatacgaggactgcgaaaagcgttgcgccaactagctgagtaccgtttgaaattggcattgccttcgctacactggaagccgcaatccctttaaactgtagtaattgcccaaaactccaaaagatacctgaaataaaactcacaataaaagaaagaaccgttatttctggtgataaaatccagaataaaatgagagcaaataatagcgcactaatcgatgtccccagtagttgttcctcgggggtactttttcgtaagttcgcaattatcggcataaatccccacccaagaacagggagtaacgcaataagataaatagacataaataagcttcctttctaggttagtggtgctatttaaatctaccattctccaaaatgaacagcaatatcccaaaattacggtattcaatgcggtaattttcgtagttttctggggatgagtctttgtaatagaataagcgtagggaaaggaaaattaaaaatgaaagcggtaacgaaaatgattgcaaatcgcgaaaaaaatatcattcagtttctaatgaagacaggtcaaacacgtgttggaactatcgcgaatcatctcggactttcagaaaaaactgtctcaaattcactaaaggaaatcgatgtttttctaaaggactttgatatgacggttgtccgtaaaccaaaaatcggtgtgtacattgaaggcgataacaaggcttttgccgaagttagccgattcctagataaccaagtcagccaaatcccatcaacgaaagaagagcgggttatctacattttcagtaaattgcttaaagcggatgactatatcacgattcatcaacttgccgacgaactttatataagtcggagcacgattgagaaaaatatggttgaagtgacgaaaatgctggaaaaagaaggcatcactttgtataagaaacctagtaaaggtatgaaactgctgattagtgaacgagaaaaacgtgccttaacatcgaaattcattactaatttttggggtaacaactggtatttaaagcaagaaggcgaaaaagtgctccaagcattcgatacgattcaggccgatgttactgggatttttccggaagaaggcttgaaagaaatcattgcgattgtccaagaattcagcgagcgtcatgattttacttttaccgattatgcgtttcagtcaattgtgattcaccttgcgattgcggtagagcgaattcgcgaaggcgagtatgtggaaaacgttgagagcgatccgatgaaagatgtgtttgagtcacagcgcaacaacacggaaattcttgttggtatgttagaagaacgtctggatatcaaaattccagcattcgaagttggctatattcagcttcatttaacggctgcttataatcaacaacatgatgaactgctcgttaatactccaccacaagaggacgatgtcgctgattttgtcagtagatgtttagcggaagggaattatgataagggcttgcttgaagacctgacgacgcacatgaaatcagctattaaccgtttaaaacttggcatgcattttaaaaatccgtaccttagcaaaattaagcaaaactttccccaagcgtttgaagaagcgctatattttaaagctaaattcgaacaaaagtacgatgtgcaagtgaacgaagatgaaacggcgtatattgcgctacattttgaagcatacaaagaaagaagtcgctctttccccgaccaaattcgagtggtacttgtatgcagtacagggcttggttcatccagattactcgcagctagaattaaaaaatattttccaatgattacgattgaaaaaatattatccgttcaggcgttaatggaaaccgaagttgatgtggatctagtcattagcacaatctaccttgaactagaggatattccaagcattgttgtaagcccgatgatgagtaaagcggatttacaacaagtcgaaagccaaatcgaacgaacaagacgcaagaaaaagaaacgcagccaaccattcgttgatttaattaagccaaaaaccatttttgcgaagttggatgttgcgacgatggaagaagcgattgcggaaattggcgacaaattggtggagcagggtattgctaagcctggcatcgtggaaagtgcgctgaaaagagaagccttatcgttcacttcttttgaagaaatggcgacaccgcacgcagaaccagcgctaatcaatgaatcgcgcattgctatcgcgacgctgaaacacccagtgaaatggggcttagtcgatgtggataaaatcttttttatcgctttgacagaacaaaatggtattaatttagacgcgatgtacgaacaattttataaatatattgataataaaaaatggctagaaaagctgacgcaactaaaaagtgccgcagaaatttatgagcatttgttaaaggatgggatgtaatggaagtaaaagatattttaaccaaagaattagtcgtttttgatttagaagcgacaaccaaagaaacagcaattgaagaaatggcagaaatgctagatgaacgtggtattttagcggataaagcgacttacgttcaagccgttttggaacgagaagcacattcaactaccggaataggtaataacattgctatcccacacggaaaaagtgaaagtgtcacaaaatcggccatcgtttttgcaagaacgaaagaaatgattgaatgggaatcgctggatgacgaaccagtaaacatgattttcttactggcaattacggattccgacaaaacagacggtcatttaaaaatccttgctgaaattgcaacgaaactaatggacgatgatattgtagaaagtttaaaaaatacacgagataaagaagaagttattcgaattttaaatggaggcgtagtagagatatgaaacgtaaaattattgcagtaaccgcatgtgcgaccggagtggcacacacatatatggcagcgcaagcccttaaaaaaggcgcgaaaaaaatgggaaacctcattaaagtagaaacacaaggcgcgacaggaattgaaaatgaattaacggaaaaagacgtaaatattggcgaagtagttattttcgcagtagatacaaaagtacgtaacaaagaacgttttgacggtaaagtcgtgctggaagttccagtaagcgcaccgattaaagatgcagaaaaagtaatcaacgcagctcttgcgttaattgacgaaaaataaggaggatctaccatgttcagaaaaattgggagtgaactgaaaaaacacgttttaacaggtatttcatatatgattccgctcgttattgcaggtgccgtaattatggcgattgctcgggttggtggttcatttttcggaattacagatatttgggatgcgaaatacgcagacagtgcgaatagtttaatttcactactgcatagtttagatggttttggtggcttggcgctaggaatgatgttcccggttattgcagcatttatcgggtattcgattgcggacaaattagcactagcacctggtcttgttggtggtttgctggcacgtgacatcggcgctggtttcctcggggcacttgcagctggtttaatcgctggttatacatgtctattgattaaaaaatacgtgaaactgccaaaagcggcggcttcaattgtaccagtatttttagtaccagtttttggcacacttattaccgttcttattattaattatgtggttggtattccttttgcagatttaaatacagcccttgaaaattggctaaatggtatgtctggatcgaaccaaattatgatggcggctattatcggcgcgatggttggttttgacttaggcggaccggtaaataaagcagctgtaacaacagcgatggcgcttttgacaagtggaatttatgcaccgaataccgcggcgcaagtagcaatcattatcccaccacttggacttggtttagctacattaatcgcgaaacgtaaatacaatacagaaatgcgtgaagcagggaaatcctcgcttattatggggcttgttgggattagtgaaggggcaattcctttcgccgtagaatctccacttaaagttattccggctacggttcttggttctgctgtcggcggtgcgcttgctgtaggtcttggcgcaattaaccaagcgccaatcagtggtttttatggctggttcactgtagaaaattggccagtttatattttagcgattgcagttgggacgctaatcgttgcgggtatgtcagtcgctttacgtaaagcaagtgcaggcgaagaaatggttggttcaagctatgatgacgaaattgacgaagcagaatgggaagcttaaaaaacggaggtaactatggttaaagcacatattgtgaaccatacgcattgggaccgagagtggtatttcacctcggccgatgcactggttctaagtgaacaactttttacagaagtaattgacgaattaaaaaagcacccagaagcaaactttgtacttgatgggcaactgtcgattttagatgattatgtcgcactgtatccggaaaaattagcggatattaagcaattaattgcggataaacaacttttcattggaccgtggtttacgcaaacagatgccttttttgcgcatggtgagtcgattttgcgcaatgcgatgattgggatttttgatagtaaaaaatacggcgactatatgaaaattggttatttgccagatacatttggttttaatgcccaaatgccgactttactagaacatgctggatttgataatgtgattttctggcgcggaattcatcttggtgaacatgttgcatctccgtattttaaatggcaaggacttggcgaagaagcgtctatctatgcgattaacatgccacaaggttacggcacagggatgctccttgaaccaacgtctgcatatgtggatggacgccttgatccagcgattgattttattgaaaaatatagcaaaacgacagaagtattaattccatctgggaatgatcaactgaatattattagcaattttgcggaaaaactggcagaaattaacaaaatggggcgccatgattatcaacttagcacctatcaagattttattcaatatgtaagagagttgcccgatttagagaaatatcgcggcgaatttagaagcccagtgctggcacgcgtgcataaaactattggctccagccgaatgaatattaagctgaaaagcgcgtcactcgagcaaaaactgttaacacggattgagccgttgcttgtgattgctaaggcatccggtatttccatcagcgagcgtttactaatgtacacatggaaaaaattgcttgaaggccaagcgcacgatagtttggcaggatgcgtttctgatcctgttgccgaagatattttgcaccggatgaaagaagccgatgaactgtgtgatagtatcgaaaacacgattgtgaagaaaattgccgatgatttggcacttgcagcgaatgaaattatcatttttaacacggatttacatgattttgatggatttaaagaaatacaagtagtaaccgagcataaaaaaattcatttccccgcatttccggacgcgacgattgttcaagaagaatttattccatctcgtgaaaatgtgctagaagaaacaccagctgggaaccgatttattgaagaacctggctactatgtgcttcaagtgcgcgttaaagtggagcttccaggcctaggttaccgcgtgattgcttttgaagaaaatgaccgcgaactggatgggatggttgcttctaacaatgccaccatccaaaatgaatcgtataaaatcactttccaagatggggaaattttgcttcaaaaaccaaacggcgagcgcctgacttctttcattacgctagaggatgatgtgaacgcaggcgatacgtatgattattcaccactagctggggatgtagcagaactattcactttttccgcagcaaatacagagaaatcgagtgaagtcgaacgtttaattttaactggaaaaagcgatttcccacttgatcgtttgacgaaagaagggcatggcaacctgcaaatcaaactcattttagaggtgaaaaaaggtagcgaactgctggatgttaaagtcgaagtagataatcaaattaaaaatcaccgtctacgcttaaaagtaaacacaggtgtgaaaacagactacaacatcgcctcgcttccattcggatatatcgagagaaaaccagttgtaccagcgaattggcgagaaacatatagcgaaatgccaatcgatatcgaaccactggaacaaagcgtgacattaacaaatgaaacggcaagttgtacagttttcacatgtggcgtcaaagaataccaacagttggatcaagatttagcactgacattactcgcgacaaccggtcaacttggaaaacctgacttagcttaccggccaggccgggcatcaggcgacacaacgaaaaaaggtcatgtgcttatagaaacagaaggtgcgcaattacttggcaaacatcaattcagactcgccatctatcttggggatcaagccttcgatgagcataaaacagctgaacgaacaaaaacgtttaatcaagcaaacgtatcctatcaacgccaaccgttcaatcactttttacatcgcttggataacaaaattcaaaaaacggaacggaaattaggcgcaaaacaaacattagctatgctgaatttgccgaaagaatacttagtgtcggcgtgccacccgtcctactacacagcagataaatacatcatccgcctggaaaacccaactaatacaccacaaaagttggcattcccggatatgtcatttgagtatgtgaatgctattgaagaagttgtcgcaaatgacaacaacacaattccagcatacggagctgtcacattacgattagatatataaaaagaaaacttgctcaaagtatttattttgagcaagttttttgtattaggcgtaaaaattctttcgaggcacttgagaaagtctgattctttttccacacaatacttagaccagcagttaaaggtggcgaaaagggaataaacttcaagttagtattttccgtattgataataccgtcaatacaaagaatacttgcgatgttctccttagcgagcaaagaagcgttataaagtaaattatatctaccaataacattcaattgttcaaaatgccctccaagccaactagctagctgattatcaatgaaagactggtttgaaacgacaatcggattagcttctatatcactaggagttacaaccgtttttttcgctaaaggatgttttgtattgactaaaatcccccaggtatcttctatagtaagtggtaaatagtcatattgtagtttttccacaggattaattaccaaaccaaaatccagtaacccgtgctcaattttttctaaaacgtcatctgcattgccgctatgcaattgaaaagtaatgtcgggatgtttctctctgagttcatgtaacaggctaccgataaattcaaatcctcttgtttcagcagcaccaaccattatttttccgctaatcgtctcattctgcagcaaattcgaagtagtcaactccactaaagataaaatttctttcccacgattcgctaaataaagcccatcctccgtcaacgtaatagacctatttccacgaataaataaagttacccctaattcttcctcgagttctttcaattgtttagagagtgttggttgagaaagatgaagtacatcagcagctctactaatcgttttttcacgtgcaacagttaaaaaataattcaacacacgaagctccattaaaacctccctttcctataacttaaaagaatagttggatatgctttataagtattattcaattataacttctctcgctataattaaatagtaaaagattttcaggggggaaagcacatgatagaacaagatttacagaataggctagtcgaccaagaaattcttcatggatcagatttgttagacgaaattcacgaagtaaagcaaaacaatgaacaacttatcatcgaactaaacaccaagtaccacacaaaaaaagaagtgaccaaatatctcagtgacattaccggaaaaccagtcgatccgtcagtcgatgtctcccttcctttttacagtgacttcggaaaacatattacttttggtaaaaatatctttatcaatttaaatgttactttcgtggatttgggagggattaccattgaagataacgttttaattggcccaggagcaaggcttgtcacggtcaaccacttagtaagccctaaaaaaagacggggactacgggtagcgccgatttgtgtgaagaaaaacgcctggattggcgcaaacacaacgatattatcaggtgtaacaatcggcgaaaatgccatcgttgctgcagatgctaccgttacaaaagatgtcccacctaacgtcatcgtcgcgggaagccccgccaaacaaattcgtaaaattattgaggaataaggagagatagcaaatgacaatcaaaaataaagtaattattataaccggagcatcatctggcattggtaaagcaacagctctacttttggctgaaaaaggagcgaaattagttcttgctgcccgtcgcgtagaaaaactggaaaaaattgttcaaaccattaaagcgaattcaggtgaagcaatttttgccaaaacggatgtaacgaaacgcgaagataataagaaattagtagagttagccattgaaagatacggaaaagtagatgccatctttttaaatgcgggaatcatgccaaattcgccattatcggctttaaaagaagatgaatgggagcaaatgattgatattaatattaaaggcgtactaaatggaattgcggctgttctgccttctttcatcgcccaaaaatcaggtcatatcatcgccacttcatctgttgcaggcttaaaagcatatcccggcggcgcagtatatggcgcgactaaatgggcagtccgcgatttaatggaagttttacgaatggagtcagcccaagaaggtaccaatattcgcacagtgaccatttatccagctgctatcaatacggaattactagaaacaattacggataaagaaaccgaacaaggaatgacgagcttatacaaacaatatggtatcacaccagaccgaatcgcaagcatcgtcgcctatgccattgatcaacccgaagacgtcaacgtaaacgaattcactgtcggaccaacgagccaaccgtggtaaatggaaaaaaccttgaactgataaaagattggttcaaggtttttttatagtgctaaggattgataaataattgatgtaagataagtaaatgaataattgtatatttactagttcttctcagaaaaatagttttatggtgttttagagattattgtagctgtttctttgggagtgacatgctttttaacaaaaattctcacaccattatgtgttattttgaacataaagggtagaggataacataagttaattcttttttttggaaaaatagttattattatttaatgggctttgaaaggggtgatgatatagaagaagtgaaaaaagagagttttggcggtaagagtgcggggcttgaattcgtcaataatagaccattttaaaaggtggaatgacacgtgtgatatcaacataaaatgatttgcatgattgaattcctattaagcttcgatagtgaaatacataaaaatattatatataggaaaaatgtgctggaacgaacgagatgaaggatatcactaaacggctccgtagacagattagctactaaataccataggaacaattcgtggggagcataatttaataaattaagcagacatgatttttcggatgcaggagaaaatcctatacaacgaaacctgatattgtttctaactattgaaaaaggagtgtatatagtgagaaaaaaacgatatgtatggttgaaaagtatactagtagcaatattagtatttggcagcggagtatggattaacacgagtaacgggacaaatgctcaggcagctacaattacacaagatactcctattaatcagatttttacagatacagctctagcggaaaaaatgaagacggtcttaggaaaaacgaatgtaacagacacggtctcacaaacagatctagaccaagttacaacgcttcaggcggatagattagggataaaatctatcgatggagtggaatacttgaacaatttaacacaaataaatttcagcaataatcaacttacggacataacgccacttaaaaatttaactaagttagttgatattttgatgaataataatcaaatagcagatataactccgctagctaatttgacgaatctaactggtttgactttgttcaacaatcagataacggatatagacccgcttaaaaatctaacaaatttaaatcggctagaactatccagtaacacgattagtgatattagtgcgctttcaggtttaactagtctacagcaattatcttttggtaatcaagtgacagatttaaaaccattagctaatttaacaacactagaacgactagatatttcaagtaataaggtgtcggatattagtgttctggctaaattaaccaatttagaaagtcttatcgctactaacaaccaaataagtgatataactccacttgggattttaacaaatttggacgaattatccttaaatggtaaccagttaaaagatataggcacattggcgagtttaacaaaccttacagatttagatttagcaaataaccaaattagtaatctagcaccactgtcgggtctaacaaaactaactgagttaaaacttggagctaaccaaataagtaacatcagtcccctagcaggtttaaccgcactcactaacttagagcttaatgaaaatcagctggaagatattagcccaatttctaacctgaaaaatctcacatatttaactttgtactttaataatataagtgatataagcccagtttctagtttaacaaagcttcaaagattatttttctataataacaaggtaagtgacgtaagctcacttgcgaacttaacaaatattaattggctttcagctgggcataaccaaattagcgatcttacaccattggctaatttaacaagaatcacccaactagggttgaatgatcaagcatggacaaatgcaccagtaaactacaaagcaaatgtatccattccaaacacggtgaaaaatgtgactggcgctttaattgcaccagctactattagcgatggcggtagttacacagagcctgatataacatggaacttacctagttatacaaatgaagtaagctatacctttagccaacctgtcactattggaaaaggaacgacaacatttagtggaaccgtgacgcagccacttaaggcaatttttaatgttaagtttcatgtggacggcaaagaaacaaccaaagaagtggaagctgggaatttattgactgaaccagctaagcccgtaaaagaaggtcacacatttgttggttggtttgatgcccaaacaggcggaactaaatggaatttcagtacggataaaatgccgacaaatgacatcaatttatatgcacaatttagtattaacagctacacagcaacctttgataatgacggtgtaacaacatctcaaacagtagattatcaaggcttgttacaagaacctacggcaccaacaaaagaaggttatacttttaaaggctggtatgacgcaaaaactggtggtgacaagtgggatttcgcaactagcaaaatgcctgctaaaaacatcaccttatatgcccaatatagcgccaatagctatacagcaacgtttgatgttgatggaaaatcaacgactcaagcagtagactatcaaggacttctaaaagaaccaaaggcaccaacgaaagccggatatactttcaaaggctggtatgacgaaaaaacagatgggaaaaaatgggattttgcgacggataaaatgccagcaaatgacattacgctgtacgctcaatttacgaaaaatcctgtggcaccaccaacaactggagggaacacaccgcctacaacaaataacggcgggaatactacaccaccttccgcaaatatacctggaagcgacacatctaacacatcaactgggaattcagccagcacaacaagtacaatgaacgcttatgacccttataattcaaaagaagcttcactccctacaactggcgatagcgataatgcgctctaccttttgttagggttattagcagtaggaactgcaatggctcttactaaaaaagcacgtgctagtaaatagaagtagtgtaaagagctagatgtggttttcggactatatctagcttttttattttttaataactagaatcaaggagaggatagtgtgaaagaaaagcacaacccaagaaggaagtattgtttaatctcaggtttagctattatttttagtttatggataattattggaaacggggcgaaagtacaagcggagactatcaccgtgccaacgccaatcaagcaaattttttcagatgatgcttttgcagaaacaatcaaagacaatttaaagaaaaaaagtgtgacagatgcagtgacacaaaatgaattaaatagtatagatcaaatcattgcgaataatagtgatattaaatccgttcaaggaattcagtatttacccaatgtgacaaagttatttttaaacgggaataaactaacagatataaagcccttagcaaacttgaaaaatttaggatggctttttttagacgaaaataaagttaaggacctaagttcgctcaaggatttaaaaaaattaaaatcactttctttggagcataatggtataagtgatataaacggacttgttcatttaccacagctggaaagtttgtatttgggaaataataaaataacggatataacggttctttcacgtttaactaaactggatactttgtctctcgaagataaccaaattagtgatattgtgccacttgcaggtttaactaaattgcagaacctatatttaagtaaaaatcacataagcgatttaagagcattagcaggacttaaaaatctagatgttttagaattatttagccaagaatgtcttaataagcctattaatcatcaatctaatttggttgttccgaatacagtgaaaaacactgatgggtcgttagtgactccagaaataataagtgatgatggcgattatgaaaaacctaatgttaaatggcatttaccagaatttacaaatgaagtgagttttattttctatcagccagtcactattggaaaagcaaaagcaagatttcatgggagagtaacccaaccactgaaagaggtttacacagtaagttatgatgttgatggaacggtaataaaaacaaaagtagaagcagggacgcggataactgcacctaaacctccgactaaacaaggctatgtttttaaaggatggtatactgaaaaaaatggtgggcatgagtggaattttaatacggattatatgtccggaaatgattttactttgtacgcagtatttaaagcggaaacgaccgaaaaagcagtcaacttaacccgctatgtcaaatatattcgcgggaatgcaggcatctacaaacttccacgagaagataactcgcttaaacaaggaactctagcctcgcaccgctgtaaagctctaactgttgatagagaagcccgaaatggcggaaaattatggtacaggttaaaaaatattggctggactaaagcggaaaacctttccttagaccgatacgataaaatggaatatgacaaaggggttaccgcttatgcaagagtgagaaatgcgtctggaaattcggtttggacaaaaccctacaacacagccggcgctaaacacgtgaataagctatcggtctaccaaggtaaaaatatgcgtatcttgcgcgaagccaaaacaccaattactacatggtatcaatttagcattggtggtaaagtaattggttgggtcgatacccgagcacttaacacattctacaaacaaagcatggaaaagccaacccgtttaactcgttatgtcagcgccaataaagctggcgaatcgtactataaagtcccggtagcagataatccagtcaaaaggggtactttagccaagtataaaaatcaaaagttaattgttgattgtcaagcaaccatcgaaggtcaactttggtaccgaataaggactagttccactttcattggttggacgaaagcagctaatttaagggcacagaaataactgaaaaagacctaaaaaagaaggcggattttcgccttcttttcttttataaattgtttcgatgtgctaatttaaacaacgaattaatattctaagagaattaaaagattcacaaaaaaataccttggtttaagtgttttcgtatttggtctttttattgtaggaatcacctttgcgctgcttaattaatagtagtgggaaaccttatcaaaacttaccaagaactatatcggactaatataggtgcaatgattttggcgcttgtacagcatttttttcatcggaggacttttacttataatccgcgtgaaaagcactgtttatgcgcgttctttccaactccatgaaaatgggatcattcttttcgttaatgaatattcagacacatcccttttagcaattgataaaaaacttgaaattaatgttgcttggcatgatgtcaagatatttttgactgtggagagcctctgatgaaagatagggtaaaaagaaaattcaggaagtaattggttaataattataaaaaatgaataagtaagtctttaaaaaattaatcattatttggctataaacagattttttacaactctttgtaaagttgcccctaacaagatatatcaatttataaggatttcgttgttcactttttgttcacatctctccttttttcataggttttgtatggaatcgcctatatttaatgactaattggttatttataatgaaaaggagtggaattacaatatttagagcggaggaaaaatgaattgattagaaaaatctttatagggattttgtcatttactatcttaatacaaactgtaattgtttctaactttaatgttgtttatgcaactaccgaagagcataaacaagaagctattaagttagaaaaaaaatcaactaataataatataatatgtataaaaggtgctgtgaaagataaagaatataaattatctttaccaaaatcttttaatttagatgagaaaaagacaggaaaagaagttgaatataacaaagaaaaaaatgagctaacaattataggaacaggggaagaaataacgctatatttacttgcttctcaaacaggaaaatacgaactagaactaaaagaaggggacaaagtacaagccaagttagatttaattataaaaaatgtagatgaagaagtcgcaaaaactgtcgaaaaatcaaatagacagttactacgttcatctatttcggataaattatttcttcaagcggattcaagtaaagccacattagctaattatacagaacaaataacttttaactattctattaattttctagatggctcaacaaatttgaaaaacggtaaattagtaatagattttaataactctaatcttgaactagtgaattatcctaaagacacggcagcaaataggaatataaaattaacatcttatagtgcgcttacaggtaaattaaccattaacttagtggataatatatctagtggtgctccatttgacattccaatcgttgtaagagctggttatggtgcaaagccaggattaccaatgaacctaaaagctacactatcaggtgagaacagttcaggtggcacgtatacaccatcagaaaaaacaaccacagttaatttagaggaaagtagctccaaccaagactatagtccaattacagcaggtgataatagctgggcttttaatttgaaagaactctcatactcacttaaaccaggtggatatactatccaatggcctgaaatccagaagaaaagtttggaaaataaaagtttcaaaaatttaaaattagaatatcttaaagaaaatggtggggatgttatatctgttaatacagcagacccttacgtaattagattcggagagcctttttggtcacagcttagcacagttaatggtaaagcaaatgtacttgttaatgatgatgagaaacaagtagtcgaatatggaccaattaacgctaatatttaccaaaaaatacaggtatcaatggctgcgaaaataccggcagatggggttgaaggaacagagtatactggtacggtaaatgtatatgatgaagatgttttcatcacctccattaaaattaaggccgaagttgctgattcagctacatcaatagcagttgatagcaaggtttctaaaacaagcatatcagaaggcgatatatttgaatggggattcatgcctagagtatcttctgcggcaccaggtgtaaatgatttagaaattgtagcaccaattcctgaaggtatcaaagcattatcatacatccctaataataactcaatggccagtataaaaaaattagagtactatcagaatggtaaatgggtatcaatggccccacaaacatctagtggttgggatttttcaaagattgaccagtccgttaatcgtattgaaaagctaaaacttacatcaagagacggaattattaatgataaagatatgccgccttatactcatggaacaattcgaatgcaaaatattggtgtgaaagcaggagaaagctttacactccgaccagaatctatcacttatacagacccagacaaaaccagtaaaacaattgatacaacgacaaatagttatggaaagaacgttcaagtagtagaaaaaacctctgctccagcgaaaatcaatggcgaagttttcttatcttcaactgctggtacttctggcaagggatttggaagtacaattttctttaatggcgacaaaattgcacagtcagttcgtttaggctcatacggaagtaaactagaaaatccatatatttttgtagtagtaccaaagggtatagatctagaaactatgagaaatttcattcaacaaccttatagaagtacattaaattacacgtatgctcctgctaatggaacgaatactctttaccctaaatctagtgcagatgttaaggggaaagaaactttatcagatggttcaacgttgtattactgggaagcaccggatactggtttagcaccgggcatggaaaattgcgaaatgttagcattagatttagttttgaaattaaataaagcaaacagtggtgctaataaagtagaatttggtatgggttcaatgacagattccagttggaatttaaatggtgctgctaattcaggacttgaaacaaaagaattatctagtgaattacaatccaaacttcccggagtaacatctactaaatacttgtctacaacgagaacagcaaatataggtgtatctaatagtattgcaactaaaatgaaaattaaaggaagtcaagataacgactttgtggatgttagtgcgaatacaggcactacaattccaggtaaaagagtagattataatttaacatttgaaaataatggtacaagaagtatgaagaacttagaaattattgatatacttccgcacaaggatgatcagtatgttctaggcactggtccacgcggatcgaaattttcagttatcccaactagtgaaatcgaagttcttgttaatggaaagaaaagtgattcagcaactttagaatattcaactagttatacgccggaacgtttcgatacaaacggggaggacgtagcaggtgattcttggcaaatcgtggctccaacaaatatggcagatgtgaaaagtttccgtattaagctaccaaatacagaattcaaagtaggagacgaaatcacactaaactttgaagcaatagttccaacagatgctccgagaaatgatgaaatagcgtataattcgattgcttaccggattgataaagaaacaggctctggtacaagcaaattagcatcagaacctcctcgtgggggagtaaaaagtacaaatccatcaacagatttaaacatagccggtaactctttctccgatcttaacaaaaatggtgtaaaagatgcggacgaactaggtttaaacgctgttaaattagatttatacaaaaaaaataacaatgaatttgagaaagtggaaaccgtttatacttcctcggatgctctagataaagaaaaaggtttatttgattttaatggcttgaataatggaacatataaaatagctgctcatctaccaaataaaaatgcagactttattactaccggtccaaataaaatcgtaaaagactcaaaagatgattcgattggctggataacagtcaataactctacagaattcacaattgatgatttggctaacggaaatcctaaaaatctagttgggattcaaattcctatttatatggcaacacctataaaaggcgctgttgtttttgtaaataaagacggagaaccaaaaatcacatcttatggtcaagattatgaaatagctttatttgataaagatggaaaagaagtacaatcagcaattaaaacgaatagtaagggagaattttcttttaatgatgtagccattaaaaatccagctgattttaaattaaaagtaactgcaccaactggaacgaattttgtctattcagcaaagaatcctttatttaacatgtctacaaaggaatatactttaaatagtgtagttccaggcgtgggtggggtagcagaaatttatattactgaaactagtaaaccaactacaaagattatactagataaggcagttactccaaatgcaattacaattgaatcaagtgatgaagctacagaagtaacaaatgaatggacattagaagatagtgatggaacagtcgtttatactggaactggaaatacgattcgtattccaaacgatgaaggaacatatatcgctaaaaacacagcaacagatgaggctggaaacaccgcttctgatgaaaaaacgtttgatatagattatacagttccgacattaacagttaatcaagatgcatcagcagaagtgaatagtacggaagcaaatattggttggattaagccgctaaatgtagcagcaacagatacgcatgatggaaatatcacgccagtagtagattatagtaaagttaaatgggatgtacttggaacatacccagttactgttacagcaacagatgcaagtggcaataaagctactcaaacagtaaatttacgcatagtagatactacttcacctacaattttaataacgaataatccattaacgtattctatcgaaaacatgcggaaattaacggaacaagaattgtacacagcggcaggacttatcggtggagataattatgatttagcaccaggtcaagcagtccaaccaaataaacagccaatggtatttactagcaactttagtactatttttggtgatatagctagtgtgaaagctgggcaatatcaagttcaagtgaatttagcagattctagtggaaatcaagctattccacaaacaattactattaatgtagtagatactgtgggaccagtaattaaagcagataatgtatcttatcacgttaatacaacaaaaacagaagcagaattcttccaagatgctcgtttagatgtgacagataacaatgatgatacaactgatttaattattacttctaattttgcagaaaaagtaaacttgaataagcctggtaagtatgaagtaaccatcactgctacagatactaaaggcaatcaaacaacaaaagaaataacagttcaagtaagcaaggataaaccagtcattactgcagatcccaaaataagttatcaaggaaaaatcgaagtaacagaagctaactttttaagtggtgtccatgcagaagtaacagatgaattagatggtgatgttaaaattactagcgattttgcagaaaaagtagattttaacaaagtaggaacatatacagttactttaaatgcgaaagatgaatatggtaatactgcagaacctgtaaaagtgtcagtaagcatctttaataagatcgcaccaactttcaataatgctgataataaaacaatcgaagcagtaaatgagttaccatcattagaatctatattcaaaattgaagcaaaagattatctttcaggtaataaattaaaagtaacttatacaccagaacaaacaattaaaggcaatgttccaggtgagtactctattaaagtaacaacgaaagatgattcaggcaacatagctgaaacaactgttactttaacaattaaagatacaacaggaccaagcataaaaatgactaaatcaacaaaaaaattagaagtacaaagcaaagaaccaaattggataactttctttggaataaaagcgactgatattgttgatggtgatgttacaaaaaatattaaagtagacagtagtgaagtcaatcttaataaagtaggaacttatcctatctactttacagttacagatgcacttggaaatgaatctagtaaattaaagagcacagtgcagattgtagatacaagtagtcctgagctaacaatcgacaaactagaaattagttatccaacaggaaaaacaatttctgataaacaatttttacaagatattggtactaaagttacaaatagttatggaacagtaaaagtaactactaatctaagtaaaattgttgattggaacaaagctgggaagtataaagtaactgtaacagcgacaaattcatctggaggcgttgctgagaaaacgattctattaacagtcaaaaatagtgattcatcgtttatagcagtaccaagtaaggatgataataagaacaaaccagcaaaaaatatcccaaaaacaggagatactttaaatacagagctaattgtcatgggtatgatgttgctacttgttggaggatggatgttcttaagaagaaaaacgaaagtaaaaacaaagtaattcataatatttgaagaatgcagtaagacctaataccgaccagagaaatctggtcggtatttttatgcggcacttcacttgcccacaaccgagttttgtataggttcattcgcttgtttcttaaatgtgtcatcctatctagctaataaaaatacgcgcctaaagttagattttttggtctaactttaggcacgcactacagtgagtccttttacaaaaacttagtaataaattcgttattctgcggtcgatctttgctttcaaggacagaaatatcatggataatactatctaatttaatttcatccatttcgagttctattttttgttggagaagttcatatttacttgaaagtacttgttggatattggctccaacgatgcaatctgggttggtttttggatcgacatggattaaatttgtgttaccttcaatacttttataaacatctagcagcgatatttcctcgggcggtttggtgagtatcggattcgctttaccagtttgtgttgtaataaggtttgctttttttaaattgctcataattcttctaatattggcaggatttgttttaacgctaccagcaataatttcactcgataacaaattcgtatttttaaaaatttctatataagccaaaatgtggatagcatcgctaaattggatagagtatttcatttttttcaatcctttcaaattttctccttgacttatcttatcataatgtttattataaaggtgtaaattataaatgtacagctttagtattaaaaaatttaaaggagtggtttaaatgacttatttagtaactggtgcaacaggtggacttggaggctacgcattaaattatttgaaagagctcgttccaatgtctgacatttacgctttagtacgtagcaaagaaaaaggtgctgacttgaaagcagcaggatttaacatccgagttggtgattatagtgatgcagaatcaatgaagcaagcattcgcaggaatcgaccgtgtattatttgtatcgggcgctcctggtaatcgccaagttgaacacgaaaatgtgataaatgcggcaaaaaaagcaggtgtttcttacattgcttacacgagtttcgcaggcgcagataaatccacaagcgctttagcagaagatcatttctttaccgaaaaagtaatcgaaaaatccggaatcgcgcacactttcttgcgtaacaactggtacttcgaaaacgaaatgccgatgatcggtggcgcattgagtgctggaaaatttgtatacgctgctgaaaatggaaaagttggctgggcattaaaacgcgaatacgcagaagtagccgcaaaagctgttgcgggcgcgggcttcccagaaatccttgaattatctggaccactaatgacatacgaagaacttacaaaagcattaaaagaagcaactggaaaagatttcgacgttatttcttcagatgataaaggatttgtagaaaatttagtttctgtcggtttaccacaacctgtcgcagaaatgttcttatcattccaacacgacattaagaacgaccaattagatgttacttctgatgattttgaaaaagcattaggaaaaccactaacgaatcgcgtggatgcgcttcgggaattgttgaaataataatgaaacagcctaccttggattgaggtaggctgttttttactgcgcatttttattatcttttcagtagtatttatacgaccttttaaacatttgataagaatgaagctataattctatatgctctttatttattaaatgaaagaaggaaaacgagtgaagaagttagttgcttggtttaacggattatcaaaaatgtggaaagtggtagtaataataggcgcagtttttgtagttataatagccttaacaacaggagaggatgaaggtgaacaaacgaagacaaaaaaagacagcaataaagttgtaaaaacggcgagtaggcccaagctttcaaccaaagatttagccttgattaaagctgatttagcagaatttgaagcgcgggaactttcttcagaaaaaattttgaaagatacaattaaagaagaaagttggtcggatttggattttgcgaatgataatattaatcaaatgattggcacgatgaaacgatatcagcaagaaattttaagtatagatgcgattaaaagaagttcagaagcctcggcggatacggaggcatttaaaaagattttcaaagaatggagtgagttcaaaatagagcggatacaagtaaccatcgatttgctgaatggaaaaaaagacagtgaagctgtatttaagaaaacatatccaaatcaaattatctttaaaaaagtgcgcacgaataaattacaaacagccttaaataacttgaaagtaggctacgaattattggatagtcaaaaataagaaaaagccgtcctacagaggatagctttttcttatttagaagaaaattcagagatcattttttccaaaaattctttctgccaagcatgatcttgcatagtaccatgcaaattagtacttagtgtcagctcacctcggaaagtagtagcagcgacttggaaaaacggtgcatattttaaagagccgcaaataaaacaatccgttaaagcgctaccttcaaaaacgagcttttcctcgtcaataattccgatattcgtaaaacttgttttcggaatagaatacatttttccagaagctttttttgcggaaatgtagctctttttcttgaaaatcagttccaataaataataaattcgcagaggggctaagctatttttttgaggatcgagagattttttgacggcttggagtgtgctttcgaatgaagttaagtcgtcatctgtgctaatttggcatgtaatattggcggttagattggtaattccactgctggtcttactcggcaaatacttacgcagatccacagggcaatctatggatatctcatgttggcctgttgtttgtagaacggtgcgcaccattgtggcgaacagaacgtcattcaccgtcgcatcgtgctcttttgcatagtggaggatttgcgaaaaattttcttttggtagtttagtccaaatgattttcggatttttcgggtcccctttcagaggtaaagttgggttatggacagctttttgcttcgttttttcagtaaaaatggactttatttctttacgcgaaagttgatcgaaaacttgctttaaactccgtgaacctaagctcaatttcgccgcataatccgggttttcaagcagattagaataaagctcactcaataaataaagatattccttaaatccagcgccatccgctaacatatgattcattataataacaagctgatcggtgctctcagtccgaacaacagtaaagcaaatttgcggaccattttctgtggaaagcttcgtaacaagtgctcggtccacttcggtttctggcgcctgcgtctccactaagaaaaccaaatcctccgcagaaaaaacactttcttgccaaaaagccccttttttcgtttctttaaaatgacaaagtaatagcggaagtttttgagtagactgcataactgctctttttagaacgtctatatttaaatgattatcaaatgtaagcaccgtatgcaaatggtggtcatttttcattttttctccagaaatataatgtttaacatcagaaggttcagcgggatactttgttatttttaccatgaaaaagccttctttcttcggtttaaattgttgttaatagtttccctgaaagcagtgttgtgaaacaagttgcggatcaaagtgaatttaagctatactgagcgtatgcaagctaatatttctaggaggcacctaacatgacaaacagaacattaactaccaagttactaggaacactaagctatacgcaagaaaatggaacgatgatggatgccgtaattcctttggatggcaaagaagtaaaggttgattatagtatttttgaaaagcttacttcagaagattattttaaagatatcgttactttaactgatcaaattccggaactacacctaaaagcgaaaaaaactattttagagcaatttgatggaaatgatacgcttactatttattttgattttcatacagatgaattgcccaaagaggttttagaagttaccgaatgtgatgcgctagaaaatgtaacaaaggaaatcttaatcgataaactagttctgtcaggcgtttggttttcggaaaatgccaataatgagttggatttaacattcgatttcaaactattaccagaagttagcgatgaacttttagttgtccgttttaatacaaatggagaaattactgaattaacccatgaaagttaacaaaaaagagcctttctgttagctaacggaaaggcccttttttttatttatacatactttcaattacaggttttaacttatcaattacaagtccgctaccaccgcgacctttgacgttttcaatcattcctaccatgaggtaattgggattatcggcatcgaaggcataaacaaaaccattttcaaggccatcttcgccttgtttttcttttagttcggctgtaccggttttggctgcgatactatgaccttggatttctagggcatgtgctgtgccggctgggtcagaaacagttttgactaaagctgctttgacttgattggcagatttagcttcggttgcttgtgtttccttgccagctttttcttttgtatcaagttttggataaggcatttttccgtcgttggcaatggccgagtaagcaatcgcttgttgaattggcgacatcagtaattctccttgtccgtaagatgtgtcagctagtaagatttctgagttcagtccatcattcgaaatttgtgctggtttcattgtgaaaggtaagttatattccttatcaaaatcaaattttttcaagccagcagttagtttatctttaccgatttctagaccttcttgagcgaagtaaatgttatcagagtgcacaagcgcatccgtcatatttacttttggaacatcatgaacacgagtgacaaagtatttgccccatgaagcatctttttgccactgtaagccagaaatttcacggactttatcaggttttgtaataccagtatccagtccgatcgttgcggtaatcgttttaaaagtagagccaggtgcgtaacgatttgcgtatcttgctaagaaaggaaggcgtttatcgtcattgtattttgcataatcttcggaagtaatcccgagcaccatttggttcgcatcataagaaggcgtgctcactaatgctaatagttcaccgtttgtcggattgatcattgtcacagcgccagtttctgaaccgagactatcaaaagctttcttctgaactgctgcatcaatagttagcttaatttcttcgccatcttttttatcaattttttgtaaagtgtcttcttgcttggtttggtcattgatgattttaattgcgccaccatttttaccgcgcagttgtttgtcatagtaacgttctaagccactttttccaatgacatcgccgacgctgagttttggatttttctcaatgtcttcggcgctaacttcacctacgtaaccaatcaaatgcgatgttgcttcatttaatggatacgtccgcatttctttttgagcataagtaagtccggttgcttcaggcagattatctttatttaacgtaactaaaggaacaaagctgtctgcttggacccatttttgatcaagctgtttgttgatgtaatcagtggagacttctagttttttgctaatatcagcaatgtttttcactttctcgtcgccttcaccaagcttcgaagggacaacaccagcttcggcaaattgaccagtagtagcgagagggttaccatttctatcaacaatttgaccacgttctgcgtcgtcttctgtgatgcgcactttatcggttttcaccataccagggaaaatgagagctggtttccaatcgattttccagtcatcatcttgcttggaaatagtcgttttgtatttttgtgtagcgagtttcccaaggctagtccgcatttctagttcgtatgttaagttgaatttgttttctttatcatcatagactgactttaaatttttgaccttaatatttttcgcgccaattccgtcgtaaacggcttggtacttgtcttccatttctttctttgtaaactctacttttttcagggattcacttgatacgctcccccccaacttgtcgtacttttctttagcgatatttgatgtaaaagtttctgcggctgctaaagcatttttttcatctttatgttgattttgaatgaaaaagtaaatggcaatgcctgcgaggacgacaatagcgacaatgcttccaatgataattgcttttttgttattcctctttttcccaccataactagccataatacaccccttaatttcatgttatattcaattaattataccaaacacttctaaaaaagttgaaaaaattaaagaaaactttagatttgcccgacatatttttttctaattcatgtcataatttgttcttatttgcttggtaaagtagttgtaacgaaaggatgatgttggatggaagagatggaacaaccagaaaagaaggtcattattcgtgggaaaggcatccacaataaatggaagtggagcacgattattgtcagtattctttctgtcataattattagtgttttaagttatcagctgtattcagttagtcaaaatatcccagaaaataatactaatggaacaatgcaaggacctggtggaggtgagatgccgagcggaacgccgccgtccggtgaacctggccaagcgccaaatagttcagacgatagttctgactctggaacaagtgatagtactacaagcagcgacggaaccctttaatatttgcgagccctctagaaatcatcattttagggggctttttccaatctttaaaaaatcttatggaattatcgctccttttttttgtcattttattgtaatatggaagtaagttacaatgaaagaggtgtgaaatatggcaagacatgcacaaaaaagaaaagcgcgcaaaggtagaatttttgttacaattcttgtagccttattaattttagttggtgtagttgcagttataggttatttccaatatcaatctagcttaaaagaagcgcaaaatgaaagtaaattaaaagattacaaattcaatggtgccaaagcagttggcgatgaaatcaatgtactacttatcggtagtgactctcgcggagaagaccaaggccgatcagacagcttgatgattgctcattataatacgaaaacaaatacgccaaagctggtatcaatcatgcgtgatacgtacgtagatattccaggacacggcaaaaacaaaatcaatgcagcttattcatacggcggtccagaacttgtacgccaaacgattaaagaaaactttggagtagacgtacaatattatgtagtagccaattttgaaggtttccctaagattgttgatacacttgcaccagaaggaatcaaaatcaacgcagagaaagatatgtcgaaaaatatcgatgcgaacattaaaaaaggcgaacaagtaatggatggtaagacactgttacaatatgctcgcttccgtaaagatgcagaaggagactttggtcgaattcgtcgtcagcaacaagtattagaagccttgaaagaacaagcgattgatgttggtgatgttggaaaaatccctgatgtcatcggaaaactacaaggctattcttccactaatatcccaacaggaacactaatgtccattggcgcagatttcctactagggaaaacagaaacaatggaaaaattcgccatcccagttgaagggaaatggcacaatgagcgaattgatggagcgggagcagtacttcgtttagatgatatggctgctaacgcaaaagcattacaagattttctaaagtaaagcagaacacggaaatcattttggatttccgtgtttttttctaatagaagcaaaaatttagcgaaagggataattagttgtttgggatatagctttttttcaacaccatttttatactattaaaacgacaaaaacaaaaatttccagccttctggaatctatatacttgaatttgtaagtaagagataaagtatagctcaagaaactgaaggaggaaatatgagtatgaatatggtcaaaaatgagtggaaaaaactatttcataataaggtactattaatatcttttatcgcaattctttttatccctataatgtatgcaagtttttttctgaaatctgtctgggacccatatggtaaggcaagtcatctaccagttgcagtcgtgaatttagatgaaacagtagaattccaaggacagaaaatggatgtcggaaatcaactagtcgctaaattaaaaaaggacgattcgcttgactggcgttttgtttctgagaaagaagcaaaacaaggcatgaaagatcttaaatactacatgattgtgacgcttccaaaagatttctctaaaaatgcgacaacacttttagatgaaaatccgaaaaaaatggagattggctatgaaacaaatggctctcttaatttcatcggcgaagaagtaacgaaaatggcgatggaagatttgaaagcccaagtcggaacgagtgtaacgaaaggttatgcagagacaattttcgcccaagttggcaagctgggaaatggcattgtacaagcagcggatggagccgaacaaattgcggatggcggaaacaaacttagcgatgggaacaaagaaataacagcgaatcttgataaattagcaaatagcatgataacttttaaggatggtgctaatgcttttaatgtcggtttaaatcaatatgcttctggtgttgaaaaagcaaacaatggcgcagcgcaactagatgcgggtacgaaaaaactagcttctaatgtaggtccattaaaaaatggcattgctgcacttgatactggtgccaaccaattatcaagtggagttggacaatatacatcaggcgtgaatgaattaaataaaggtacatcatctgctcttgtcggttcatcaagtctcacaaaaggtttgaatgatttaaataatcaactaccaaaccttgagaatggtgtcggtgaattacaaacaggattagagaaattaaacacaggtagtgtaaaactgaaatcaggactagaaacattagattctaacctatcaagtccagcgagtaaatcacaaattgcagaattacaaagtggtttgaatcaatttaagacaggaattaccgaattaaatcaacaagttaacaatactcaattaacgactattgttaataaaagtaaagcaatcgaaccaactattaacaaaattgaagaacatttagctgcactagaagcacttacaagcgggaaccatagtgaacaaattatcgctaaaattgaagctttagaaacattagttcctgaagataaagcaaaattaatcaatgatattaaaccgattctagatgatttagcccaaaaacaaaacgaaatcattcaaatgttgcataaagatttagaagaaatgagccaattattagcagatgttccagacagtattgatgaaattgaagctttacaatctggagttagccaattaaataatggatttaacggtaatccaggcatttacagtggcacaaatgctttaatcgattcaatggtagatattcaaaaagcagtaggtagcgcgaacgatcagaacacattactaggcggtgcaactgtgcttcataacggaattgcagatgcgacgacaggtgtcaaagaattaaatgaaaaagtaccgagcttagcagatggggtaaaccaattaacaggtggcagccaagccctaaataatggcttgaaaaaaatcaatgacggaacaacagaattggataacaaatctggggaactaaacagtggtgctacaaaactcgcaaatggtatgaatgctttttcaggtcaactaccagctttatcaaatggtataaatgccctaaataatggggcaatacaattagcagatggtacgaacgaacttgcagataaagtaccaaaattacaaaatggcgcagtagcattaagtaatggagcaggcgaaatccaaaatggttcagcgcaactagcggcaggttcagcacaacttggaacagggattgacaaattaaatacaggtgcaacagaattatctacaaaattagcagctggaagccaacaaatgagtcaaattaatccaacaaataagaacttcaatatgttcgcaagcccagacaaagtaaaccataaaaattatagtacagttccaaactatggagcagcattagcaccatatgttatgtcactagcgctatatgttggggccctagtattcaacttcgtattcccaatcagaaaaatttcgatgcggggacaaacaagtacagcatggtgggcaagtaaagcttctgtaggcgttttcgtagcaatcgtaatggcactaatccaagcaacagtaatgttagtactcggattgcatatagattcactgattcaattttatgcaatggcaattaccacttcacttgcttacatgttcattatcatgttcctagctatgacatttgataatccaggacgttttgtcgcgatgattttactcattgtacaactcggaggtgcaggtggaacattcccaatgccactaactaatggattcttcaatgcgattcacccattcctaccaatgacttactctatctacggattcagacaagccattacaagcggaatcggcatgaacgtttacttccaaagtttgctcgttctagtaggaatcttcgcagtattcattggactactatggctcgggatgaagcaattgcaaaagaaacatcttgagggagtgtctcaactagataataatcaagaattacaagcagtagaagattaataaaaatagctctatattctatatggatgtagagctattttttaatttttaaattgtaataaaagtttgaacaatatgccgaattttcttgatattagaattaataaatgcgattatgttatactttaaaacattgatttccatttagaggagtattttaaggcaaatgtggtataaggattaataaatggttgaaaaataagtggactgcattttatggtcatttgtataggaggatatccaatgaagaaagatgtttatctggctggagaccagagtataactgttagtatgatgcttttgagaatgattgcagaagagtcacgttggtatactgtaaatgagctgagcgaacgtttggacatgaatcagagaaccatgcagcgttatattgcagatttgttggagaaaattgaagactataatgaccctaatattcaactgtataccgcaaaaaacaaaggtgtgtttctagaaattacattaggtgcggatgtactcaattttgaattatatcttttagaagagaacgtaacaattatcctcatgaaagctatctttttcgaagaattcacctctgtaaaaaaatttgcgatggattattttttgagtgagacgacgattcggaggtcgttaaaatattttcaagaattgcttgaaccttatgggattaagctgaagcgagaaacgtatgaagttgtaggacctgaggaacaagttaggatgtttttttatagttatttttggcggttgtatcaaggggcgatttggccatttgacatagttaatcataaaatggtggaagaagctacgatgaaagtgacatcgagtctgagacagaacctaacttatgtgcaacagtatcagattgagtatgtgatagcgattaatattattcgaattcggaaaaggcatttagtcgaactaaaaccgaattggaaaaattatttagacctaaataacgattttaaaagtttgactaaaataaaagctgtgtttgaatcactaaatatccaaaaagagagtgagatttatttcttttatttattaatggaaacacgtcctaaattatatgaaaataaagaggtagctagacgagctttggaacctcataaaaagaataattctgatgtttatgccgctaccgaagtttttatacgtgttttttcagaagaaatggccccgatacctcagaaaaaatatgatcttttttttaatagtagcttttcagcacatctattttgtacgttatttaagtatttttcggcggatattaatgggtatgaatatattcgtaaatttaaagaatattatccgaaattgcatcaaaaaatggatgagttgttggatattctttatgaagaaacaggcaatgaattatttttagaaaaggactttttattgacgagatatggtttactcttttcttctattaaaagattaacctattttgaggaagagattcagattgtgctagatactgatttacctaagtttgcagagcttaatttaagacatcaaatttttgattcgttgaaatatcgttataaagtacattttttgaataagaatagtgcgccgcaagcagatgtgattttgacgactgttgctacgccgatgatggtggagcggtataatagagaaaaggtgctccacattggagcagaaccgtcagcacgtgatttctataacatcgtcaatattgtggtcgaagcgatttctactaaatagaatagaagaaagctgccaattttggtagcttttttgcgtacaattaaaaatgtgcagacaatacgacaaaatcggaaatttagcgaatgtaaaaatcgatataataagtattgtaagttagagaaacatgaggataagacaacatttagacaggaaaacatggcagtcaaaaatatacaactaaaacgacaaaagaacaaaattacacgaagaaaaactcgctataataagtagcatagtaagtaaataaaattttgaaggagagaataaattatgtgcacaagcttcgtattagaaacgttagatggaaaacatttattatcaagaacgatggattttgcttttattttggaggcgaacccaacaattagcccaagaaattatggatggaaatcttctacagacggtgccaattatattaatagatatgcatttgttggagcgggaagagagttagataaatacattttcgcagacggattgaatgaagaaggattaagctgtgcatctctatatcttccaggagaagcagtttatgcgccagcaccagtggaaggaaaaatcaatttagctccacaagaatttttgctttggctgttaggaacttgcgcaacgattaaagatgtggaagcaaagttatcggttataaacttggtggatcaaccagtaccgttacttggaatcacaacaccattacactggattttcacagacaagagtgggcgttgtgtagtgattgaaccaacagaaacatcgcttcgtataaaagaaaaccctgtaggagttatgacaaatacgccacgcatcgaatggcatatcgagaatttacgcaactacacaggtttacaagcaacacaattagcgccggtgaagttcggagagtatatggctaaaccattttcgcaaggtacaggaacaagcaaattaccaggtggttatactccgccagaacgttttgtccgtgcggcatacttgaaagaaaatattataaaagcgaaaaacgaagaagaagctatcacaaatgtgtggtatgtcttgaacagtgtccgcattccgaatggagcggtaattaaagaaagtggtgaccctgatttcacacaatatgtggcatctatgtgttcggaaagcaaaacgtactatttcacctcatacgaaaacaaccaaatcaatagtgttactttgtcgaaggaagttatagaaaatatgaaagaacctactacctatcaagtggataaagtgcaaaatgtgaataaattagtctaaatagctctttatataacgtaatattctgaataaaaaattattggaggaatttatatgtttaaaacaaatgttgaacaaaataatgtaccggtgtttggctcttttgagtcaggacaagatttaccagaaaaacgcatgaataaggaatctgtagatccaagaattgcttatcaacttgtgaaggatcaactgattgatgagggttcagcgagacaaaatctagctacgttctgtcaaacatatatggaaccggaagctgagcaaatcatggcagaaacgatggagaaaaatgctattgataaatcagaatatccacagacagcaaagcttgagtctagttgtgtgaatatgttggcggatctttggaatgtggatgaatcggagcattacatgggaacgtcgacggttggttctagtgaggcgtgtatgcttggtggaatggctatgaaatttagatggaggagtgctgcactcaaaaatggattagacatccacgctaaaaaaccaagcttggttatttcttcaggctatcaagtttgttgggaaaagttctgtgtgtactgggatattgagttacgtgaagtaccgatgagtgaggagcatttgagtatcaatacagatatcataatggactatgtagatgaatatacaattggtattgtgggtattctgggcatcacctatacagggaaattcgacgatatcatgactttaaatgaccttgtggaagactataataatacacatgacaatgaagttgtaattcatgttgacggtgcgagtggtgcaatgtttacaccgtttgttgagccgggtttagaatgggattttcgattaccaaatgttgtttcgattaatacatcagggcacaaatatggtcttgtatacccaggtgtaggctggattttatggcgggacaaggaatatttgccagaagaattagtgtttgatgtgagctatcttggtgggcatatgcctacgatggccatcaatttttccagaagtgcgagtcagattatcggtcagtattataatttcttacgcttcggatatgagggttatcgtcaaattcatatgcgtacaagagatggtgccttgcaattatcacaagctgttgcagaaacaggacttttcgaaatttataacgatggcgcaaacttaccaatcgtatgttacaaactaaaagacgatgctaatgtggcgtggacgctttatgacttggcagatcgcttacaaatgaaaggttggcaagtaccggcgtatccacttccaaaagaaatgggtaacacaattattcaacgttacgtttgtcgcggcgatttaggacaaaatatggttacagctttcaaaaacgatttgagtgaaagtattgaagaactaaataacgctcatattttatatcatgatgtcaatacatctaaaacacatggctttactcattaagaaaaatgggagagtgataaaatttctagcactactctccctctttttttaaatattgcctacttagatcaaattatctttaggaggaaataaataatgaaacaacaaacttctgcaaaaactttatcactattcggattcttcgcaataacggcatctctttttatcactgtttatgaatatccgacatttgctacttctggattttcactggtattctttttactactatgtggattcttatggttcttgccagtctcgctttgttctgcagagctcgcgacagttgatggttaccaagaaggcggaattttcggctgggttagtaagacgcttggagaaaaatatggttttgctgcaatatttttccaatggttccaaatcacagtcggttttgttacgatgatttattttattattggcgcactatcttacgttattagtttcccggcgcttgattccaatccaatatataaatttatcgcggtccttataattttctggggactgacgttacttcaattaaaaggaacaaaagtaactgcaatctttgccaaattaggcttcgttctcggtattacaattcctgtattagcactatttttcttaacaattttccatttaaaatcaggtcatcatgctgcaatttccataacagcatcaagttttattcctaagtggacaaatatgtcgtctcttgttatcttcatgcttgcttatatgggtgtagaagcttctgcaccgcatattaatgaaatgaaaaatccaaaacgtgattatccactagcgatgattctactcatttttgtcggaattactttaaacacaattggtggactatctgtagcttccgttgtgccatcacatgatttatcactaagttcaggtgttgttcaaacatttaaagcgcttattttacaaaatggaaatagtatggagtggattgttaaactgattgcctccatgattgcatttggagttatggcgcaagtaagttcatggattgttggaccaacaaaaggtatgcaaactgttgctgataaaggtattatcccatctgtattccgtaaaacaaataaacacaatgttcctgttccacttattatggttcaaggtgtcatcgtttctatctgggcagcggtattgacattcggcggcggtggtaacaacgtatcattcctaacagctatttcattaactgttgtcatttacttgattggatatgttctcttctttctagcttatttcgttcttgtcttaaaaaagaaaaatctagaacgcacatatcaaattccaggagggaaaatcgtgaagttaatcgttgcaggtgttggactattaatgtcagtagcagctatcgtatctgctttcttcccacctacatcacttagtaagagcagtgatatgtcttatgaaatcattcttgcagcaagcttcatcgtcactattttaattccgtttttcatctatggtatacatcttaaaaagaaaaacaaagtcacaaaagaaaaaactattcaagaaaaagttgctttatcaatgaaataagaggtggaaaaatgaaaaaaacaataagatggagaaactcttaccaaccagaaccttattttacaactacgaaactatggattttgttgcatatcatctctctggaattagaagatgatatgcaagaaatcgaaccagagaaaaactaccgtgaaaaacaaatataaaaagacgagcttcattttaaaaggttgactgagccattttgacactaaactagtgacagaatggctcattatattgtttaaagatattttacataagagtaattaatcttttagttttctaaaaactgccttatgttaataaagtggatggttttaactaacaataaggtttgccagattaagacgaaatattgtcacaaaataatagtaaagaagtgatagacttgttttaaatttcttttttcgcttcacatagattataatgaatacatattttaaaaaggggtgagacgcttcatgaaggacaaaacaaagaaaagaaaatggaactgggcacagattttagctatttttgtattagtaacgctcgtagtttcgatggtttatgcaacagttaatttaattacagcgccatctggcaatgttccagaaggacaacaaacaaagggcgactactcacttatgcttatgcagtgtgtacttggtgtggtagtgctattcttaccatccatcattagtaaaaaaatgaaattcgtcattccgaatgcgatgtatattgtttttatcgttttcttatattgcgccatttatcttggcgaggtacgtagtttctattatttaattcctaactgggatacgattttacatacatttagtggagcaatgcttgggggacttggtttctctattgtgagcttactgaataatgatgaacggattaccctttcgatgagtccggttttcgttgcattatttgcttgtagctttgctgtattcttgggtgttttctgggagttctatgaatttgcagccgatagctttggaatgaatatgcaaaaaacgatgttagaagatggaacgatgcttcaaggtcatgcagcagttgctgatacaatgggcgatctgttcgttgacttcctcggggctttcgtgatatccatcatcggttacttctccattcgcaaaaataaaaaatggatgaagaacttcgaatttaaaaaagtagatgaagaagtaaaataaaaaaatgccaacaaagtgagaaatcattttgttggcatttttttagataatcttgctttctctatcaataaacatcatcataaaggcgataagctgtaaaaatgcacaaacgagaatggcatattgagcaaatagctggataaagaaattccccactacggcgccaataataaaactaagaataaccgaaaaatacaagaaactattgtgaagatattgtttttccttgtactcgaaataatcacataagttttgcgtagcacttcgcaaattccctatgcacatcgtcgtcgcaacccctctaccatgcatttttcggaaactttctacctgaataccacatacgaaagatatgagtgaattggcaatcagattatgatcaagtggaataaatgcgaccccaatcaaaattaccgcttctatcaagacagaaagctggcgccagtgaagacgcctaatatcgcgccgatgaatcacttcagataatgcgattccgaccgtaaaagagacaaccggccaaaaatattgaatagcgatagcccagttcccctctgaaatattaattccaaataaaagtatattcccagtctgcgcattagcgaatacctggcctctttcaatgtaagagtaagcatccataaatccgccagccagtgcaagtaacagccccaacccgattgattctgaaatttgtctagttcttgccatgatttttcatcctttttgtcttatttattaaccatttgttcgcgaagagcgtcaactagctcattaacttgctcgatattttgcagcatttttttctcaaaatggtgaattggaagaaatacgccaagttcatctgcattttccgatgtttcttgtccgtaaaaaattcggctggacggaataatttcctgtatgtgcaagaaagttttccaaataaacgcatagacttccgactcagtcattcctgattttaaagtatcaggaagagaatacagtactaaaatccctctttttttattgatacgtttggtagaaatcgaaaaatctggctcgtaggaatgaacgatatcatcatcatctactaagaaaatcgttgtttcagaatgatgcaaatccgattgataaatctcttgaaatttctcctgttcgcggttagaaatatcgtccttcttggctataaaattaccttctttatctgttaaaaagaacggattatccacggttaattttttgggaataagaaaagcttgtctgagaagttcgaatagtgttctcccgcaaacacctaacaacaaggcacttacatcactttgcctataagccgacaaaataattttggcaaaaagggtatcatctttttcaaaaccgcgcgtctcttgatagctctctaaattatcaagaaatacatctttgaaacgtctgcaagctgttggattagccaatatctgttcgaaaaggggagtgacattttgttcttttgggaaaatagttgtcattttcaagtctcctttaatttattcatgttaatattatcacatatttatggtaaaaagataaaaatattacataagaaaaagcgccatcaatcgtttcctaggcgcttttttctctgtttatttagttaatcgagcgataatttgttgaacaagctgcgtttccttcgcagctatcactttttcggttaagtttttgctataaagttgtgtttcatacatttttgttagtcgcgagaattctgacgttgtcaaatcagcatccactctggcactaaaatgacgtaatgtttcactcgattcgcgtacataaccataagaagcaagtaatttcatgagtctatgataggttttgccaaattccggactatttctcagagaacgaagcaataaatagccacggattctgcgcctaaatacaatagctagtgcaagcagtgccacaactagtccagcaggaatccaccaaacccaagacggaatttcgacattagaggtcgctgtttctgttttaggttcttcttttttcggtgtttcaccagtggagctgctgccgttatcttgttctggcgttttatcaggtgtatttggcgtttccggtgtacttgtactatcattaggtgtttcaggtttattagctgtttctgttgttggttcttggaaattttcgggattggagaatgttgctgttggctcaaatggaacccatccagttcctgggaaaaatacttccggccaagaatgggcattgttatttgtgattgtgtaagtcgttttagcatcattttcttttttctcaccctcaccaggtgtgtagcccttggcccatcttgctggaatcccaagcgatcgaagcatgactaccatggaagtagaaaagttatcacaatacccaatttgcgtttcaaataaaaattgatcgacataatccgctcccataggcgtttctttcgcatcatctgtactataagtaaatgtgccagaagtgcttaaatagctttcgattgctttcgttttgtcgtaaattgaatcagcgtctttagttactttattcgccagttttgtcacccggtctggtaagtcttttggtgtttgtgtatattgggaaacaaaagcgttagaaagtgtgctaaagtcagcattctgcattttttcaatattataaacgggtgtttttaattggaccgtataatttttgattgtatccactggtccaactcgctcaatagttaaattggcactaaatgagtccactgcgccattaactgcttgcgttccatatggataaggcatgtaatcactagaagaagcaaagctaatttcagccgtgtttgtagcaccagttgtttgttctgtgagttgaatagggaaattatcaccggaagagaaagatatgacatccccggaatttgcatttgcccagccggtgccagtatagaccgttttcgattctacacgccagtagtgccctttttccgcttgggccgtgaatacagtagcgttatcctttttgagagcaccaccaagtgtcgtatcatcttcactataacccaccgtgcgcgttgtattaattccaagcgcattttttatcgttggtattggatcagggaaaattggtgcttttttcggaagcattaacgaactaaaaacaaatacagccagtaataaaatcacaaaaccgtgataaaacagaccatttcgtttcaaagaatccgcgcttattctgttaggtgttgcaatccgacttgccagtgcaagatgaagtaataaaaatccttctaatacagtccggacgattgcccaattactgttgtaatctgtaaaggtgttaataactgctaaataggcgactgttaaaactaaaacgctcataatccgctgtttgcgcaaaatactatacgtagtaatataactcaaaagccatagagcaattaaaaaaacgattaaaataaaatccatagaaatatcggacgagcgaaactgtaccatatctctaaaaccattaaaggtaatttggaaaaaagaacctaaccaattgcccgccagaataccacctttagcgtagtaaattcctgaaacgatgataatcatcacgacatgaagcggaatcgtccaataatatttcaaacggaggaaaaaactaccgagtgaaagggttataaataaaataatccaggttgctgttgatagttctgtcagttcagcgaatgggtaaatccactcagagataagtaaaacagatagaataaatagcatgacgagcgttaaataccttttcatttagtttcacgctcccatctgcttaaaagactggcttgctcaaggaaaatcgctggagcatccatcgctttagaatgctctgattggaaagtaatgatttggagctgtttgttatccgttaaacgagtcactttttgcattaacatcgtatccatacatggtgtgaacagaaggattttctcgccggaatgtaaattactatcaagcgattcttgcagtgttaaactatctactggtgcgatttctgcgaaagctgttgaaatatcttgaagcctactagtacctttcgctggagcaaatttactcgtttgatcacctaaaagtgtgacgcgaatttctccattttcttcagaaattttgcgtatgaacgagtaagctgctcgaagggataattcgaaattgggatggcttgctccataaaaaatgacggataaccgcgatgtagcactattttcaaactctcgcgtcatcagttggtcacttttagcagaggatttccagtcgataagggaaatccggtcgcctgaagaaaattcgcgcaaactgtgcaaattgctgtttttcttaagcgtccaataagcggcattgcgttcgttttctggagaagcttcactgattttttctagcacattgggaaaataggttggataaatagtgagcgatttttcggaagatagttggcgcgaacgttccaacaaaccgaaagcatcactagtttctacatccactggcggaaatgaatgaatcccacgaacgcctacaaatccagctagtgtgaccgtgaattgctttttaaaaagcggataaactacttgttggcgagccctcactttgccaaaggtagcgggtattttttgttggaatagcaaataacccaccggataacgcgattttcgagtgaatgatacttgcatatcaattaaatcgccatcatgataggtatttttaacaaagctccgattcactttccacgcttttagtggataaatcgaggataaaaataaaagtaacaagataaaactaaagaaataggttaaaaaccaactagctgtatcaccttgaaataacgtatacgtccatagtccagcgtaaataattagcataataatccaccgagatgctaacaggaggcgttttttcaacatttagctacctcttctctaccggaactgacgtgtttttcaaaatagaagcaataatggattcggctgtttcctcattataataagcttcggacttcaaaataagacgatgggtgaaaatatacggtgctaaatactgaatatcatcaggaatcacataatctcgaccttcaataagcgcaaaagcttgagcggcctgcatgaaagcgagcgagccacgtggactaattccgagcgcaacagaagggtgttttcgagtcgcgtcaactaagcgaataatataattttttaaaacatcatctataaaaacttgttttgctttattttttaggtccagtaattcgctgagtgtcaccacttgctttgtttggtcaagtggatcctggtattgttttaatgtaagcagctgcatttcttcctcgactgtcgggtaaccaatattaattttaagcaaaaaacggtctaattgtgcttcgggaagggcgtacgttccttcatattcaatcggattttgtgtcgccataacgaaaaatgggttggcaagtttgcgcgtaataccatctactgtcacactgttctcagccataccttcaagtaaagcagcttgagttcgaggcgcagtacggttaatttcatccgcaagaacaatatttcccatgacaggacctggacggaattcaaaatcacgcgtttcaggattgaaaatcgaaacccctgtcacatctgctggaagtaaatctggtgtaaattgaattcgtttaaaggaaacaccaattgttttagaaagggtgcggaccatcatcgttttaccaacaccaggaacatcttctaataatacgtgaccacccgcaagtagggcagttaagcttaatttaacaacatgtcgtttgccgacgattactttttcaacttcattaataatttcatttattttaatggatggctctatagacataatttgcctccgtttcttttcttatgtttttaatctgaatatgtttattcatggttcaatgctactataataggccttgaatgtaaaagatttaacgtggcatggactttttctaggagattgtttacacttagaataactggaggtggcgaactttgagcgtaaaattggcagatttaatgaaattaccatctttaaaagaagcgaaagtagtctctggaaaatctggattatctaagcttgtttcgtctatttctgttttagaatatacagaggtagctcttttagaagatgatttatttgataatgatgaattttatggcagtgaaatagttgtatcggcttttgtgaatattcgtgacgatgttgaggcacagtgtcggacaattgagcgattacataaggtcggcgaagttgctttaattctttactacgtgggaatttttgtgccgaaaatggatcaaaaactgattgattttgcaaatgaacttgattttaccattatcgtgatgccggaaaacgagatgtcacttagatatagcgaagtgatttatgaagtagtcgaagcgattgtgaagcaagaaatgacagataccaactttgtaaccgagtcattagaacagatttcgagtgtgcgaccgccgcaacgaaatattgatacgacgctgaaaattttgtctgatagaacgcattcttcgctcgttttaacggataattctttccaagtaattaattctatcacttggccacgaacgcgccactgggattttgaacgggtaattgaaacttccaaacaaatagatgaacatgagcttgtacaactccatttagatgaacgtgatttttatacggccagaaagccgatttttcaagatggtatgcaagcaatgcacttatttatgatgaaagaaaaaggcgcattaacggccgatgtagtcatgcaaattaccgaagtagtccaagtatttatgaatttatggggcagaaactatgtcgaaattagtacggctgaactgatgaaagccattttaaatgatgaaagtgttaaaatgcgacgacttggtaagattttaaatgtggatgtttcttctattaaatggatgtggcttgtgaaaaccgaagaaattcgtaacaatgagcaagttttagctgaactgaaaagttttgtagctagtcacttccaagtttctttaattgatttatttgaagacaatatcgttgttttgcttgataattcagtgggacagcgagaccggacgcatacagcaaatgagtttgcgatgatgatgaaagaacatgggatagacttgaaaattaccgtttgccaaggaatggagcaaacgtcagatgtacaaagtgcttattcgctcgttaatgaatataaaaatgcagcaaatgcaatttatgcgaacaagtccatttattctcttcaagaaattgattttgcggcaaaatgtgtggaaatagtagatcggggagagttagcaattgcagaacaaatgaggccactaaagtctttagaggataatgatgaattaattgaaacgctgtctgtatttttactggaaggtgaatccaattataatcaagcggctgaattactattcctgcataaaaacacgattaaatatcgaattcaacggattaatgagttgttgcaatatccggcgacaaaaattccagagtcctacaatctctatttagcagtggcgattcggcgtttacttggcggaaataacaataataagtgaaaatagtgcattttttgtccaaagtgacaaagattgcgctattttttttcaattctgataaatacaaatgatagctagttcttatataattagtcattaatataacaaattcaagaaaaaggggcggaacataatgacagagaagaaaacagtggagcaagcgcaatcctggcagagtttagcatttgtatggaccggagcaatgatttgtgtaccgagtctactagttggaggaaccttaatttcaggtatgcctttatgggaagcaattttaatagcacttttaggatacggcgttattgttgtatttatgatatatcaaggaatgcaaagtagtgatttaggcattccggcagttagtgtagcttcacaagtttttggagaacaagggtcgaaaaaaatcatatccattcttttagcaattgcttgtctaggatggtttggtattcaagccaatgtatgtggcgcagcattttcacagtttctaggcatttatggaattaatcttccagtgccagtatcttccttgatttggggagttatcatgttactttcggctatttatggtattcgtattttgagtattttaaattatattgcagttccgattttactttttgtgtgtatttatgggctagtcgtttctttaaacaatggcggacttgcggttgtagaaaattacaaaccagcaggcagtatgtcgtttatgacgggacttgctatcaccattggttcttttgcgcttggtgcggttattgctggcgattattctcagtatacgaaatcgcgcaaagatgttgtaaaagcagctattgttgggattttaccatcaggtgtgcttatgattgcagtcggagcgattcttgctcttacggcaggaacagctgatatctccgtagtattcaccaatctaggcttaccagttcttggaattatcggtctgatacttgcggcatggactaccaatgcggtcaacgctttttccggtggtatcgcaattattaatgtattcaatatctcagaaaaatatcataaagtggctgtagcgattgccggcggactgggaacagttctagcggttatcggaattttgaaccattttgttccgattatgtccgtgctttcggcgatggtgccacctgttgcaggagtgatgattgcttcttactggatcgttcaaaaaggcgataagtctaaatgggctccagtaccgggtgtaaactggcttggggtaacttcttggttagttggagcagtaatcgcaggaattccagtcattttgacatttttcccagcattaccacaattaccaaatcaacctttaatcggcattatcttgtcacttgctgtttacttggtcggagcaaaagtgctgagcggaaaaacgaacaatgtagaaaacttggagggaaaataaatgcgttatttagatgaacaagctattgaaaatatcgcgattggtgctgcgtttcttggcactggtggcggcggagatccatatataggcaagatgatggcattaactgcaattaaaaaacatggaccaattaaacttttatccccagaagaaattgcggatgatgattatttcattccagccgcgatgatgggggcgccatctgtactcattgaaaaatttcctaaaggcgacgaattcgttcgtgtatttgaaaagttaggtagatatgtaggcaaagaagtaaaaggaacatttccaatggaagctggcggggtaaactcaatgattccaatcgttgtggcagctcaactaggcttgccaatggtggactgcgacggcatgggccgagcttttccagaactacaaatggtgacgttccatctagacgggatttccgcaacaccaatggctatcaccgatgaaaaaggcaatattggcatcatggaaacaattgataataaatggaccgaacgacttgcacgtgtgacaacggtcgaaatgggcgcgagttctcttgtgagcctgtatccgtgtaacggcgcgcaaatcaagcaaagtagtattaaaaatatcgtgacgctatctgaagaaatcggcaaagtaatccgcgaaacttcgatggacgaagcagaaaaactacaaaaattattagatgtaacgcacggttatcatttatttgaagggaaaattaccgatgttgttcgggaaacgcgtgcaggcttcaactttggacgtgtgaaaatcgacgggctaaacaaagacacgaatagcgaagtcattgttcatttccaaaacgaaaaccttgttgcggagaaaaatggcgaaccgatagcaattacaccagatttaatttgtatggtagaccttgaaacgctgatgccggtaacgacggaagcgctcaaatacggaaaacgtgtccgtgtcatggcactaccagctgatgatgcttggagaacggacaaaggtatcgaaacagttggaccgcgctatttcggctacgatgtcgattttgaaccactagaagaacttgtcaaaaaggaggaacgccgtcatgtataaaattggaattgatgttggcggtacaaacaccgatgccgttattttagatgaaaatcaacaactcattcatagtgtaaaaatgccaacgagtgaagatattgaaacaggaattactgagtcacttcatcgcgtattgagcgaaacgggcattgatcgctcgaaggtaacccatgccatgcttggaacaacgcagtgtacgaacgcgattgtggaacgtaaaaaattagcaaaagttggcgttcttcgtttaggctatcctgcaacagcatccgttttaccatatacagcatggccggaagacatggttggcttcttgtctgggaaatataaattaactggtggcggctatgagtatgatggtcaggtgctatcagaaataaacgaagcggaaatccgtgaaaccttggctagttggaaaggtgaagtggaatctgtcgcagttgttggcgtcttttcttccttgaaaaacgatcaggaattagctgttcaaaaaattattgaagaagaactaggcgcagatattccggtttcaatttcctcttccgtaggttctgttggactgattgaacgcgaaaacgcgacgattctaaacgcagctcttttcaaagttattgcggcaacgagtgatggttttgaaaaagcactagaacaagaaggaattgaacacgctgaaatctatctttgccaaaacgacgggactttaatgtcactaaattatgcaagacaattcccgattttgacgattgcttgtggaccaacgaacagtatccgcggcgcatcttacttggcgggacttaaagacgcaatggttctcgatgttggtggaacgacttctgatattggggtgcttacggatggttttccaagagagtcctcgcttgcggtggatgttggcggagtgcgtacaaactttagaatgccagatattatttccatcggacttggtggaggaagtatcgttcgcgaaaaagatggcgacataacaatcggaccagatagcgttggctaccgtatttccgaagaagcactagttttcggcggtaaaacgatgaccacaaccgacatcgcggttcgtctaggtatggcagaaatcggtaaccctgaattagtcgcacatatcccaaccgattttgccgaaaaagcctataaaaaaatcgctgacatgaccgaagatgcgattgataaaatgaaaaccagttcgggtagtgtaagcctagtgcttgttggtggtggtagtgtaattattccagacgaaatctctggtgtcgcacaaattttccgcgacaaaaacggcccagtcgccaacgcaatcggcgcatccatttcccaaatcagtggacaatacgaacaaatctacatctattcgcaaatcgagcgggaagaagcgctccaagatgccgagcaaaaagcaagagaacaagcaactcttgccggcgcagtgactgactcgattgaagtggtggaagtggaagaaatcccattggcgtatcatccgggcaatgcaaccagattgcgcgtgaaagttgtggggaatttggtttaaggggagtaaatagtggagcattgctgacttcagactggaaacaaagtaagaaattactttgtttccagtctgtttttgtataacgtaaatctcatatgtataaaaatacgttttatacgcaagggattacagttctatttgaataggttattttttaatggcttagtttacttttgaatgtataaaattatgtatattgacgcaatttgtgttattttggaaatggattcaaataaatcaattcttatactaattatctagaaaacaacccaaatgctaactaaaaaatattctggtagggtaaataaatgaataaagaaaccgaacaaaaactagccgcgtcattcacttctaaatcaatagaaatattaccgtttattccgtatttttcacaaggctttttcggattgggtagtagtacgaaagatattatttaattaagcaacatatgccattatatatgttgcagcagctgatatacttggaaatccatcagaaatgttggggaaattgcagggaaccgttaaagaagacggttatgttattatagataaagcatatgtgcctgaattagtgcgcaataacgagatgaagtatcaaaatcatgaatatctcactcgaaacgaatagctgaatttatttgaatagaatcaattacaattggtggaagagctagagagaaccccagaagtggactttgaactggaaaagaaacaattagtaacaagagccaatggagcggatacgatgacttagagaaacatcttattgcagttatatggattttacataaaaagaacattcaaaggaagtgttttaatgagagaatatttagattcaaaaagccaaaaaaaggtagcgcttcttgagaagattttttatgcggaaaatcatacaagtacacaagaggaactattaaatgatttgaacattacgtatccaaccctcatttctacgattaaaacaatcaattttgatattgaacgctttggctataaagcgttttctattgttcactccgcgccaaatttgtcctataccttaaaaatatcggataattgtagtattcaacttattatcaacgcgtatattagagagtcgcctaaatttcaaattctcgaaactttgttgctggcttccttccctaatctacaagcattggcaaaaaaagtacatgtttcttattctgggataaagaaagaaataaaagaattgaatgaagagctaagggaacggaatttatctatttctacaggaaaccaggtagaaataacgggggatgaattttcattaagaatattctatgccttcctttttttagtcacatatagtggggatcgttggcctttttcttttgttcaatatgatgaaatcaccgacttattagagagttgcccaaaagaaatttatagagcaaactcgatagataaggggatgatgattcactattatgtggctatgcatttattaagagatagaatgaattgtcaaattgacacaactcggcagtttaaagtagccctatataaggcttgcaccgaggagtctaagaaatcagagagtgcgttcattaaaaaggtagcgaaacaacttcctaataggaactataaagaaattacctacacgacgcaaatcatactgagtaccattgttgctttcggtagttattcttctattgaaaaaatgccttcctttttctacatggatgaacagttagaagaaatgggcttcatgaaactagttgattttgccagtgaacgagtaaatgataatctctctattccattttcagaaaaagagatggaattgctccgttactcctttgcgagtataaattatagatatttcttacttgataatttaatcaataagttcaataatattgtgccagggtatacagatcttgatcgaaatataagaaaaatccataaagtgaatcacctagaaccattgattagtcaattagtaaatctaaaagaaatgcgtctattaaaaccgtttgaagaaaaacttgcttcagattatctgatcattttggataagcggattgatttttctatacacaccttgcctattaaagtaactattttatcgaccatatctaatgaaacagccgtatttgattttatgaggtatttttctagttactacaatctggaaataattaatcaagtcgatccggtcgtggatttatatataagtgatttttccgtatctccagaagtgttgacatcgttacgtatcaatcaaccaatagtctatgtaaatactagatggctagaatctgattatgtcaaaattaatgataatctagcgaaaatagcgagaaaaaaatttattgctaataaaaaagattagggaaatacttgttggaatttatatggaacgcgtttaaatggaaaactaaagtcttgtccgagtaatgatagttactcggatttttttatttgtgtagtactaatggtaaaaagcaaacacaattaataagccataaaattttaagaagttaaaattttatggctagaggtacccccttactcctctataataaaataacagctagaatgtttagcaactagaaactaattacggaagaaggaggggagctgatgaagaagctttccatgcgagtcatcctaatcgttaccattattttcattgcttgtgggagcgctaatgtttctatcgcacaagaaagggatacaacgaatatacttccagaagaggagctggattctctttatacctctaatctcattacagaagaagtcgcgcaagacaaaccggcagaggtcgagaatctagaagaagccccaattacggaagatttggtacaaaatccagatgttcttgagcagcctattgccgattcggatgattcggatttaacagtagtaaactcaggtgatttttggacaatttatcgtaatactgtgaacggtgaatatagcttgcatatgtttggtaacgtgccaagtagtaaaccaaccgcttggaatagttatttgaacagaattaaacatatagagattgaagaagctactttgacaggaaatttctcatcgtattttagaaataatgttttcacagtacttgagagtgtgagaattgaacgttcgaatctatctagagtgacgtcttttgcactcgcattttatagttcaggaattgaaaaagttatcattagagataataattatccgacagcaccatctttactcactacggaaggtatgtttaaaaattgttccaaccttatggaggttgatttgagtggtcttgatactagtgcggtaactactatgtgggatatgtttaacagctgtagggcacttgaggaactggatgtaagtcattttgatacaagttcagtaactaatatgtcttacatgttttatgataatagaaatcttgaggtgctggatgtaagcaaccttgataccagttcagtaactaatatgtatgccatgtttgaagattgtactagtcttgaagagctggatgtaagtcattttgatacgagttcagtaactgatatgtatagagtgtttaatggctgtgaaaaactgaagaaactagatgtaagtaatttcgataccagttccgctactgcaatggttcaaatgtttagaaattgtagcgcccttgagaagttggatgtaagtaattttaatacgagcttagtaactgatatgcgtgccatgtttgctggttgtactagtcttgaagcgttagatgtaagtaattttgatacgagttcagtaactaatatggctgccatgttttctgataatgaaaaagtggagaagcttgatttaagtacctttgataccagttcagtgactaacatgggtaccatgtttaaaaattgtacagcgttaaaatctttatatctagataattttacacatgcagcaagctcgacagatatgtttactggaacaacctctttatcttacttgtttgtcagtcacaatgtaagcaattttaatgggttagaaaatacaaactggtatgacgaaaagaattgggtgcagtttgaaactctctcgcaactacagacatatcatcggaaacaaagcgaacctactggctatagaaaaggagctttcctttccttaacgatggatgcgatgggtggacagtttgaagacgcggaggaacaaaaggtacaaaataaattttctggggaatactgggaagaagtgattcctgtaaaagaaggacattattttgacgggtggtaccttaatcaagattgtaccaataagtttgacttttcattgcccgctgatgcatcaataactatctacgcaaaatggatagaaaactatacagtgattattccggcttctatttctttaaatgaaacttctgaattgaaagtggaagggattaatcgaggagataaaaatttgtccgtgggattaaatcgaacagcaacgtctatttctgagagcaacaagctaactttaaccaatacggcagacacaacagtccaatgtttggcaccactgagttgggacgggtcagaaactaatccagaaaaagcgattttaacccttaccccaggttcggaaataacagaaggcgatgcagtcatgaatatttcaatcccagaaaatatccaggcaggaaaatatacggggaatctagtgttttcgattaagtatgaatgatgtaaattagccagaatagtaatcatgtcaaggtcatttggttattaataaattggaggttacctatgaagaagaaaaaagtagttgttatatcattactactattgctagtaagtgtcattggaatcagtagttattttctattcaaggataaaataaatctgttggatgtagacccttctgccgttgagtggaacgggaaaaaacagaaggatacaagtggagaagaaaatacaatcgccattccgggttttgaaaaagtaacgttgtatgcaaatgaaacaaaacaagcagttaatttccataatccggaaattaatgattgttacttcaaaatatcgcttattcatccggatggttcggttctatggagatccgatttaatcgaaccgggaaaaggtatgtattccattgaattagaaaaaacgttagcggtaggcgaatatgaaaatgcagtattaaaatatgaatgtttttctttaaacgatcagtcacctttaaacgggtctgaaataaatttaaaattagttgtcgtctagacaaaggaggaaattttttatgaataaattagtattaagtacgttaagtgtagcagcaatgggtatggtgatttttagcggagggacagcctacgctgcagataaagaaggaaatacagtagtggaatattctgttgaaggagattataccttagttgtaccagaaaaagtaaatttatctaatgataatgccacagaaatgtctgtgaaaacaatcaatcgtaacttagaaccaggaaaagaagtagaggttacattatctagtggattatcagccgatggagagattgaattagaacgtgttggcgctacttcggacgtaataaccagtagttttaaaagtaataatagtacagtaacaatggctaatcctgttatcggaagcttttcaggttatgcaatagaggaaacagaagtaagtaaaattcaaattggaagtcctcaaggagacaaaaaagctggagcatatcaaacaacgttaacttttacagctgcttttaaataagaaattacgaaaggagttgtacatttcttgaaaaggaaattagttttggcaatggtactaatcagcttttgtgggatgttcctcttatcgcctgaacgagttcaagctagtcaaacagtggttgaggtgttcatttcagaggatgatttggatgtcagtgaagaaaacatacaggaaatccctaaaaaagaactggcagcctcttcagataaggataacaaacaacatatgttacctaaagcaggtgatacagtaactaactataccttgttgggcttagtgctcgtccttatttggttgataatgcaaagaaaaaggaagaagaaggaataaccctctgtgacatcatcataatgtagtaagtaaaaaggatataaaaatttctgtgttagataggaagtgacaggtatggctcgaatcgaatatggagaagaaattcaaaaaagcctactggttttatactctagggggtctaccatagactctatctgcaaggagtatggtatccctcgttacgaatttcacaaatggatgaagttacatgatgccgataaacttgaaacaaaagaggtgaagactttgctacagataagagaattaaaacagcaaaaaaacaaattagaagaagagattttatttttaaatgaagcaatcaatctgttggaaagtccttgatagggatgaatttaaaaattgattgataggtagtatgggagagaggatgataatttcatcttctctttttgatacacctaattaatgtgaaaaaggttataaaataattagagtgagggtgcatataaatggacaaagtctttctatcttctattttaatcaaaaaaagaatggttcatgagtttacgaaaacctccaatttgaaaatctacaagggacagctgctacactagaaaaagtgtatgtggagtccaaagaagaattagagaagattatttatcaacaattaattaataatataaacgtgaaacctgacccatggaaatgggaagaaagaaatgcactaattgtcgagatagaagtaaaggcggttttagaaaaatatggatccacaccgatctgaaaaatggtatctttacctacatggcttagttatcaagcggaaaaagaagggttaagtttatctaaagtattgcaagaggcattaaaagaacgattaaacagaaatgagggatgagtaatgagtttagctggaacgataatttattctgctttatgtatctgtctaaagactttgtagaaacatctaataattcgcaagcttcgactctagtaatgagttccgattggtagtaagaatctatttgttgttctttcttttctatggattcgtctgattccaatatctttttaagactcatagtatcacctcttttcaaattatatcatctggaaagttccttttttatattataaggtagataatctattaagcaacaatagattatcattatttagcctataatgataaaataagactagatagaatcggtgtattttggagtacacaacatttttagtaagaacattatctgctaaaatttatgaaaagtaacctttgttgagcgaggacatcaagtgataaaggagagaagcagtatggtgaagtatactaatccaaaaattgagaaattaggggtaaatgcagtaagcaactacatagtggaatcagattatttatcagattttcttgcacaacagagcaccgagcctgcaacagatggaactataaggatttataatggtcctggagagcgtaaacgtgatttaattggaattgtgcctgtccaagtcaaaggaactaccactaaaaatattataaagtacaatagacatgaaatcgatatagtagacctaacctattattataaagtaggaggagttgtctattttgtggtatacgtcacaaataaagttcctaaaatctattatcgtgatttacttcgaatagatattaaggaaatcctaaaaaaaaatgaaaaacttcgtggtaagaaagaaaaaggaacaataaccatcgattttcgagaagtaccagttaatgtagaggactttcgaacggtgttattgaacttccataaggatcaggattatcaaacaaaagattatgtggaattaggttccataaatgagataagtagagacttgacttttacaattattgcaccaaatagtaatattgttgaagcgctaaaatatgtttcaccagtactatataaaaatgaaggtgatttaaaaattcccgtaagaagatttaaaattggagaactaagcgtttttacaaaaagtgagttttctataggcattaagggagcaaatagttatattgctactgtgatggaaggtgaagaagaaacagaaatacaaattggtagtttgcagcaattaatagttaaatttaaagaaggcagatttaaagtagattttgaagcaaaaggaaaaatccaagagactatcgaattactagaaatattactaggtatagtcactggagtaaatttatatattgacaataaaccagtcactgaattttttattgaagaggtaaacgaagattttattagtcgtgttaatcacgctttagaatcttttaagaagacacaagaagctttaaaccattgcaaagttccgtcgaattttcattatgaagaattaacagagaatgatatagatgtaatcaatagcataatggagctataccaaacatcaattgataatacttgggggaaatttgaattcaataatcggttagtgtatttgttgaagcataaaggtactatatacaatttattggattcaaatgttgcccttgaaataaatttttggtcgaaacgtgaagacggaattcaatatacaacgacgcccctaatattgatagatgatttttctaaaatgaatgatactgaaatttgcaatattaaaggacctattgaaaaattgattccaattcatgaaaaagcatgttctgatattaatttaatatgtgtaagactaattgatgcatatgatcaaacgaataataatcaatttctgctagtagcttttgaacttctagaattaataataccatttactactaacaatgaaatacatcttatttatttaaataaataccagataaaaaaacgttgggacaatttagtaatggaagacataaatcatttagtatccatccaaaaagagtttgaagaagataagagaatacacttagcaacgttaattttgttgagtgctaaaaatgatgcagctcaacttttaagtgaactaaagaacaatgagggttttagtttagaagatatgcctattctaaatttgttggaaaagaactagcaaaggaactctcaaaaaagtacacaagaaatgctacgaaagaaatgtatcaaaaagcttcagagaagatgaaagaaacgatgaaagcgaatattgcacttgttgagagtataaggatttctagtatttctaacaagaaattgcaatcagataataaaagtggacacacggtggttacctttaaagacaataaatgggtggctagaatatgtgtatctggagtagaacatcaactaggatcttttgttactaaagaagaggccattgatgctaggatagaaggggaaaaatattttcaacctttgataaataaatataataatagactggatgtgttttatagtgaacgtagacccttttggacgtaaagtagaactgatgattattggaaatggactggatgttaaagcaaatctggcatcaactttcgtagattattataaacatcgatgcaaactaatgaggctagaatataatgaagatgatttctatagactaaaaagtaaaaattactttcctatgaaggtgaaaatgcaacaatttccttcaataagacgttgcaatattgaaattctttcgatagatgctgaaactgccataaacgaaaatattactttttgggatttagttctttttttttgcctttaaggtagaaggtgatttaaaatggtgtaatattgagtctaaaatagaaagggttctaaataaattaggaggttacttgagtgatcctataaatataattttaaataattgcggatttggagaaaatctggaggatgaacaagaaaacgatttgtacaatttaatggaagaaaggctagaagagaaggataaatatgtgttaagtgtagctttcattcataaactaaattcttatagtaattgttcattagaggaatttttaatgttagagttgaataaatatgaaaaatacttttcggactacataaagactgaagtaactaataaatatgaggagtaccataaaacaagaaataatatcctgactaaattaagtggtggcctgggagctacacatagtataagcgttatgaattttaactttacgcctaatcaatttagtgattcagtaaagttaaatgaaaaaattggacttgcacatgtaaacgttcacggttcctatctagcaaatagtatctttggcatagatactaagagcctagaagatattgatactattggaagcggctataggtttacaaaaacatataggaaactaactcttaaaacgaaacggtctacagagatactttatcacgatataacagatattatcttctatggtcattcacttggccaagctgattatgcttatttccaaagcatttttgattatctagatatttataataacaccattgtactaactttttattactctgattataaggaaaatgtgcgtgaggaacagacaatagcagttagaaatttgattgaagaatacggaaagacttttgataataaacataaagggaaaaacttgttacataaattattactggaagagagaattagtgtaacagatttagagatttatgaagaagattatagttcaaaggacatgaaataaaaagggataaacaccattgcgaggagaaatcttaatggaaaataaaatattgaatgaagattgcttaacaggtatgttgaaaattaaagataattcaattgatatgattctgtgtgacctaccttatgaaatacatgggatgaattgatagacttagaaaaattatggatacagtatgatcgaataattaaagaaaatggggcaattattttaaccgcacaaacaccgtttgataaagtgctaggagcaagcaatatagataatttaagatatgaatggatctgggaaaagactgcagcaacaggacacttaaatgccaaaaagatgcctttaaaagcccatgaaaatatattagttttctataaaaaattaccgatttacaatcctcaaaaaacggtaggtcacacagctgttcattcctatacaaaaaaacaaactgatggatcaaactatggaagaacaaaagctggaattactggaggcggtagtacagagcgttacccacgcagcgtgttaacctttaagtcagataaacaaaagtcaagcttacatccgactcaaaaaccggttgctttattcgagtatcttattaaaacgtacactaatgaagggggactggtattatataattgtatgggcagtggtacaactgctatagcgtgtcttaatactaatagaaaatatattggttttgaaacagatgtgggtcattacgagtcttcattatcaagaattgctaatcattgctgcatgcttaaagaagtgcagatttaaaattagatacctttataattttattaaattatagttgactattaaattataatttagtataatgagggtcatgaaaagagagccatgcgctaacatgactccctaacagtagcaccgcttaaaagacggcggccattgactaataattacacgaagtaaccatcgatcagctcactaaagtggattagatggttatttttttggcttattaaagtcgagaatcatcacgacgagggtggcaaataccaccgcaaacgtcagtgcttcatacacggacacggttattcctttctaggagtaaaaccttctataaccaagaggcatcacccccgttcctggagatttagccaccatctttttcactttactactgcttttcttattatatcataataatatagaatatgattacaaattgtagaatagcttaaagaccatatgaaaaggagcctgggcatctttcatacggtctttaattttaaaataatatacaaaaatagagcactatatcttgtggaatcatgtgaaatatagtacaatatatatgaaattaaagtattttgagtcggaatttgcatttgtgcgtgcaaaatctcaaataatttcacacaagaagttattttaaaaaaatcgatatttttattatatagcttcgttgcagtaaaagcaaccttttttttgaaaggataagaaaaaaatgcacaaatatattaagggagttatatatgaagagaaaattttcagaagaattcgagctacaaggaacacaaaaagactttcagtttgtagatattaaactttggacagaccaagcattgtttatcgacccatctctaatagcgaatgctcaacacaaggaaaatcaaaatgggagtatagaaacgaattatgccacaagggctcataattctttacaaagctttttttctacattttttgaaatgttcaaagatattagtccttctaaattaataaagaaaaaagatcaaggaaggaaaggtattaatcgggatgaaatgattttaaatctattacaatattcgacagaaaataatgccttgcacttgggctatactgctgatgaatcaaagggaacaggttgttccccgaaaatgatatatgattttttctccaatatgaaatttaaacatcccagtatgtttgactttgtaaatgagccttttcatgcaactggatttattaatgaaattgggaaagatagatcgacagatttaacggtatctattattttagatgtattatgtgatttcacattgtctatatgtactcagtattctattcctaccaaagaatttgagaactatagacactattgggatccaaacgaaaaaatgtggaaaacacgaaattatgatttacctaccaataataatggggagccaattgtgctggtacctaaatccttcgtaactaataaatttcaatacgatgcagaatatgtgctaaagaattatatcttagaagaaaaattggatgaattgcgagcacaatatccttcaaaaagattgattaagagcgacgccttaaaaaaactccgattagagcatccggatgcatttaataaagaccttgttctagagtattttgtagagaaaccaggttcttataagaattttatgcaacgtgtaaataacggtatcctcggaacccatcgtggattgttaactgacgatgaaatagaaaaggcaacaagcgagactcaagaaggagattgaattttacaatcgtattatttgaaacatacatggcctattttatgtgaaaatatgatttatagaacattgttgccaatctaactcaatgacattgagttagattggtataaatgtcgtaaatactggtattctaagagggaagacgattttcgttttctctgtttttctgcattcatttggaatattacttaatatacaaaataacgatgttaagtaataattgataaagttgttgttttttagattgaagatgtacaaccaatcaaaaatttggagcaacttactttggtgaaagacatttcatatctttatcccaagacgatattgaagaaagaaaagtcttacaatttttcaagcggtattaatacaatctatcgaatttctgatttgttgagtttgaagtaaagggatatagtttaatgttgcaaatagagttataaaaaataattatttttaattaactgtttatattgtataaaatagtgtatataaacacattttgtgaatttttgagcgtttgaaaagtttgaatcacccagattgtgacgattacaagagctttttagacaaaaaaaggtcgttcaagacaagaatcggacatttcattacaattttggttatacataaaaatattatgttatatttatgtagccctatttctaattattgatatatcttgctattttaggtaaaatatacaatgaaaaaagttactttaaaaccgatgtacttagaattatgtctcaagaaatatttaagtacgaaataaaatttgatgcctatttaagagaatgtgccaaaagtacagattaccagcgcattgcagaagaaaatttaagcaaattggtacaggaagataataatcagaatgtattagcaaatgttcttagttttaattatactcatattccttcaaaagtgactagcgaagagggtgatgagattagtattaaagtgaaagataatgttcatggtaaattagggaatgaaattatttttggaattgatcacggtactatagataatgatacccctttgtataattttacaaaaacttataggaaattatatgagaataaagactccgaagaatctgtactgagcatagatataaaagtgataaagatttacggtcactctctaagtaacgcagattatgcttattttcaaagtatttttgattttttaaatatctatgaaaatccaatcaacattatcgtatactataccaaatacaaggaaaatgaagcagaaatcagacaagaactttcaaatgctgttcaaaagctcattagtagatatggtcagtctatggataacaaagaaaaaggcaaaaatttattgcataaactattattggaaaatcgtttaactataaagaaaattaacctgaaggaagcatcgaaaagaagaagatttgcaccggcaattgacggcaccaaatacgaagccagatatgcaacaagtctatgcagtgaaatcaagaagcgttcatacccaattgctgaaagccatcgaacaagagaatatcctagaaaaatatttggcttttgaacaaagtcatggcccgttttttaatgcattagccgaactcattcaagcgactggacgcgcggtgcaagagttgctacatcatgtgacttttaacgataaaacaggcacttacgctgtgccgaaaagtgcggcaaacagcttgttgcttatgaaaaaagcgctggataacgcacgaacagaaaatgataaagacctatatccagatgactgggaagattacacggtattagcctatacatatgtgaataatcaaggtgaaactgtcacgatgtggttacttgaaaaagatggaaaacgggtagagaacaaggaattacaagacttcttagaaaaacatggtcaggaattaccagctatttcttatatagaactttccggggaagaactagaacggcgagtaaatgatagttggaaagatggagtaaactatttaactgggcaaaaagtttcgggattttccggtggtgtattaagatcctcagcttatgttgcgagtgtgaaaaagacattggattctgctgaacttattgatattggtctaggattgggaacagcagcaatgcgatatacaccgctactagctgaacaaattgaaaaattgagattagccaaagtagggcgttggatgtcagtagatgagtttgaaaaaatgcttgaaactggtaaggtgcaaatgtcgagaaatggaaacaggacttatgtggcttatccggcagataaagatgcctttccatccgcagcagatgatgcactatacgctgaatttaaggtgaatgaaaaaacgatttatccagctggtaaagaaggctgggcgcaaataccagggccgggctcattaatcgacaggtttaatcaaaaaaaaggattacctggaataactgaaatgccagatgctcttgatattaacaacttaggaggaaaataattatgcaaaacgatatgtataataacattcgtttgagtgtaatccaattgatagattcaaaaaaagaaaatctgaaggagaataatataaaattaacaattataaagaatgaaaaagacggttatgttgtagaactggataatgacaaatgcatggcagaaattgtagttgaagaacctacttataccccatatcgctatatttcatttgaagtagtttctttgatggatggaaaagttaaaattatctattcttggtatgatgatgaaacaagtcaatggagcgatattgagaaagaattaaataaaggaattcaatttctaaataattttaaaacgatggagcaataaaagaacattattgctgtacttaaattcctataaggaaatataatcacaaacagtaaaaattaacctataactataaaaatgataaaaaagacatattataaataagagtgtatgtttgtataaaatgtgcaaacgtacacaatgaatttaataagaaatacaaaaagtgaactcgtatatccaaataaaagtgtttaatctgtgtaaattaactttagactatcaagtaagcagtatcgcataacaggattagttccaacaagctatggtaagaaactatatgcttttaaatatcaggatgtacgtgcaataggtacacttaaaggcaaaaaatagattaacaactaaaaaatgtaggacattggttctttaattccaaagcatattaaggagtaatagtatagtgaaaagaataattttaacaagtacattaatcgtttggacaatagtatgcatttacatgagtatttctatggttagtaataatactggcattgcttttccaatttggcttcacatcattcttttaatctgcttcttagcgacaagtatagtaaatgtgaagaaaaaagaatatctttggagcactatgttatttgaaggcgagctagtagttctattaagtttaattattgtattagtctaacggatgtaaatatatgaatagatggatgttccaaactaaataggagtattgttaactcaaacctctcaagtaagcagtgtcactactgcttactttttttggttgcttttatgtagatgccgtgcttacttctctcagatgcccaatcattcatttcacgtactttttctgaaagctcatccgccggaataagccgcccatccaccaaaacagacggattaatcaaacgcattttcttcttatgatgataagtaaagtctacctcattttcttccaaatggggactcgcgagcaactgaattttctcccgagcatctgaattcgcattcaatttagccaataattcagcatcagtcaaccgaagatcagccgtcgtaatcgtctcctgctgaaacgcaatgcgcattgcttcagccaaaatctcataactataaacattcagcggatcataaaaataatcaatcacttccgaataatattgcgcaacaaaccattctgcaagagcgatatttgccaaataaagccgcccatcaaccattactaaagcctgcaaaaattctttcacctcagccaaactaattttcccatggcgatacaaatcttgaagcgtgtaatcaatccggtcagcacaaagctccggggcttcttgctccaaaattttccacttcgaaatatcattaaaaatcccttcaaaagaataaccatacttctctaaaatggcaggaatcgtcgaagtttttacaaagtcctcaaaaatctgctcatgataatcttcctcttcaaaatcaagcgcataatccaccacatgcgaaaaagcagtgtgcgatacgtcatgcaataatccagcaatttgctcctccaaagagccaccgaactttctaataaaaagcatcacaccaatcgaatgatcaagccggctaaggtcccaaagtggatttactaaataactcgaaccaccttgatgcacgtgtgctagccgggaaaccaatggactttggattagttcagccaaaactggttctatttcaaatgttccgtacagcgggtctgtcattttcatcatattcacctcttttttttaattatatattagcgaacaaatgttttccatgctttccctagcaattccaattttgctgagaaagtttataaaaaaattactgaaataaccgaagatgcgattgataaaatgaaaaccagctcaggtggcgttaggctagttcttgttggcggtggtagtgtgattattctagacgaaatcccgttggtgtatcatctggctaatgcgcccagattgcacatgaaagttgtggggaatttggtttaagggaagtaaacagtggaacattccagtcattttttataaagtaatcccacgtgtataaaaatacggtttatacacgtgggattatggttctatatgaaataggttatttattagaagggttaaatggcttattttatttttcaatgtataaaattatgtatattgacacaatttgtgttattttgaacataaatttaagtaaatcaattcttaatgtattgattttcgcctaaaatgggtcgttcatgacaagaatcggacatttcattacatttttggttatacattcattttctatgctatggttttagtaggaataactattttggtacaggaagtaagcttgtagtacatgtatttccttcattagttgccctgtatgatttaccaaattatttttcaaaagcatataagccacaacaagtgaaatactttaaataaatctcatatctcaggaagtgtagctaaatgaaaaagtataaaaaatggtggataacgattggtatcatatttctgcttagtgttattggatacgtttattggtttgcgattcccgaacatatggcgaataaagcagtgggtaactatctagcagaacaaaaaatcaaatctagtcaaattgaaacaagagtgataaagaaagattggaaaatgggtggttatcttacaacgataatatttaaagatgatccaaatctaaagtatgaatatagctatgatgaaagaatagacttaccttaccatgtttttgtggacgcttataaagatggttcgggacaaacagaaggtgagatgaaacacccaccattagaagaacaattggaggagatgaataaatcgaagtagcttcaaattaagcggagttaaaaacttcgctaatttagtttgctaggaattgtgtatttttaacaacaataagctgtagaataggcggagcattttcgccgcctctttttatatgtgtataataaatcacattttactttgatacgaatcaataggtgattttttattgtctaactctaatatcgagctcttaaacgtatttaattcaagaaacacgaaaaatccatttttcaaaaacatataagccacaacaagtaaaatactttaaataaatctcatgtcttaggaagtgctgctgaatgaaaaagtataaaaaatggtggataacgattggtatagtgttaattctttgcgttatcggatatgtttattggtttgtaatccctaaacatacggcgaataaagcagtggataactacctagcagaacaaaaaatcaaatccagtcaaattgaaacaagagtgataaagaaagattggaaaatgggtggttatcttacaaagatagtatttaaagatgattccgatttaaaatatgagtatgtttatgatgaaagatacgaatatcctcatcatatttacctcattgcatttaaagatggctcaagtcaagaggataaccagatgaaacacccatcattacaagaacaattggaagagatgaataaatcgaagtagcagtaaattaagcggagtaaaaactcactaatttagtctgatagaaattgtgtattattaacaacaataaactttagaagaggtggaacattttcgcctcctctttttataggtttataataaatcacattttacttttatacgaatcaataggtgattttttattgtctaaataggatatacttcataaaacatctttccctaatctaataccaaactattagtaaacgtatttgattagggaaatgtggaaaatccattttgcgaaagcatataagccacaacaagttaaatactttaaataaatctcatgtattaggaagtgttgctgaatgaaaaagtataaaaaatggtggataacgattggtatagtgttaattctttatgttatcggatatgtttattggtttgcgattcccaaacatacagcaaatgaagcagtagatgattacttagcagcgcagaagataaattcaacgcaagttaaaacgagggatattcaaaaagattggactagaggaggatactatgtcacgatagtgtttaaggatgaccctaatttagtgtatgaatacaactacaatagtaaaaggaatacgccttaccatattaatctacttgtttttaaagatggctcgagtcaagaggatgaccaagtgaagcatccaccactacaagagcaaaaggattaaagcagaaacccaagcattttaagtaagcagtgctactactgcttacttttttgtattacttttatgtaagctcggcataaaaagtatcactccaatcggataatcaagcaggctaaggtcccaaagtgaatttactaaataacttgagacaccttaatgcacgcgagctagccaggaagccaaaaagctttggattagttcaaccaaaatctgtcattttcattcaaggagataataaagcaccaatctttcccatgctttccctagcaattccaaccccacctgagatacaattaacccaaacaaacgaaacggggcggatgccatggcggaatcactcattactaaaaaagcgattgctggtgggctgatggagctttgtcagcataagaggtttgaaaagattagtattgcggatattacgaatatttgtgggcttaatcggcaaactttttactatcattttacagataaatacgatttgcttacttggacgtatgaaaatgactttttccattgtttggcggatgggattacgcttggaaattgggataaacatgtgctgaaaatgctggaatcgattaaagaaaatgctgatttctataaaaatacggtttccgcggatgcgagtattctttctttttgcttttcaaaactaacgaattcgctgtttatggatttatttgagaaaattgatacgaatgcgactgtgaatgaagcggaccgggttttttatgcggaattcttttcttacggatgctctggtgtattgattaaatggattacacgcggtttcaaagaagcgccagaaacaatcgcgaatcagctatttcgacttgcgaaggatacggagtttttggcaaacagcatgtaccgcgaaaactagacaatatggcgaatttgtctaaaaaccagacataaaggttcttttgcccagattaaaagcgaacgacaagcggtatactatctgtatcaagaaattggaggagatagtgatgaaaaataaaaaacgtacgctagtcgctctaactggggctgcaattgggacaggtattgccgcaaagaaaatttctgaacaaaaggccgctgaaaaagaacgggcagtggatgaagcaattaaagcgcgctattatggtgacaaacaagtgtatttcgtcggtggcgggattgctagtttggcgggggctgtttatttaattcgtgatgccaattttgatgggaaaaatattcatattattgaagggatgcatattttaggcggaagtaatgacggagctggaagcgtggaacatggctttgtttgccgtggtggtcggatgttgaatgaagaaacctatgaaaatttctgggatttatttagtagtattccgtcgcttgatatgccgaactttagtgtgacagaagagattttgaactttgaccatttacatccaacccatgcgcaagcgagattagttgataaagatcgcaatatcctcgatgcgcattcgatgggatttaataataatgaccggatgttgatgacgaaactgctcgctactccggaagaaaaacttgataatttaacgatacgtgattggtttgacgaacactttttcgaaacgaatttttggtatatgtggcaaaccacttttgctttccaaaaatggagcagtttattcgaatttagacgttatatgaaccgaatgatgttagaatttagtcggattgatacgctagaaggtgtaacaagaacgccgctaaaccaatacgaaagcttgattttacctttaaaaacatttttagataaacatcatgttgattttacgattaatcaaacggtggaagatatcgattttaaagatgcgcctggaattacagcgacagcacttcatttatcggatgaatcaactattgaacttggcccagacgatgacgtgattatgacgaatgcatgtatgacggatagtgcgacactcggcgatatgaatacgccagcaccgaaaccagaagaaaaaccaatttccggggagctttggtataaagtcgcgcaaaagaaaccaaatttagggaatccagagccattcttcgctcatgaggaagaaacaaattggcaaagctttaccgtcacttgtcatggtgataaattattaaaacgtatcgaacgcttcactggaaatattccgggaagtggcgcgcttatgacatttaaagattccaattggcttatgagtacggttgttgctgcacaaccacattttaaagcgcaagatgcgaatactacgattttctggggttacggattatatccagaccgcgttggtgatttcgtgaaaaaaccaatgaaagaatgtactggggaagaaattttatatgaattaatgtgtcatttgaactggcaagatgattttgaagaaattaaagcggatataatcaatgtaattccgtgctatatgccgtacattgacgcgcaattcgaaccgcgggcaatgagcgatcgtccggctgttgttccggagggcagtacaaacttcgcgatgattagccaatttgtggaaattccaaaagatatggttttcaccgaagaatattccgttcgcgctgctagaatcgccgtgtatacgttacttgatattgacaaaaaaatctgtccagtaacaccacataatcgtgatccaaaagtgctagcgaaagcaacccaaaccatgtttagataaagtgaaaaagtagctatttgtgacagaatagctacttttttagtgcgagacaggacaaacggctgatatttacgaaatagcattgcttgtgaaccataaaacagctataatctttatagacgaaaacaagacctgaaaagaggctgaacaatggaaaaaagctccatttatggattaacatggacaaatttaacagaatggctagaggcacacggtcaaaagaaattccgcgcgacacaagtgtgggactggctttatagaaaacgtgtcaaaacttttgaagaaatgagtaatgttccaaaagaaacaattgaacttttaacagcgaattttgtgatgaacactttagaagaacaagtggtacaagaatctacagatggcacaacgaaatatttatttaagctgagtgacgggaacttaattgaaaccgtgatgatgaagcaagaatatggcttgtcggtttgtgtaacgacccaagttggttgtaatatcggctgtactttttgtgcgagtgggcttttgaaaaaaagtcgcgacttaactgctggcgaaatcgtggaacaaattatgaacgtacagcattatttggatggacgtaatttggaagaacgcgtgagtcacgtggttgtaatgggaatcggggaaccgtttgataattacgataatgtgatggacttcttgcgtgtgattaatcatgacaaaggcctcgcaatcggcgcgcgccatatcactgtttcgacaagtggccttgcaccgcgcattattgattttgccaatgaggatttccaagttaacttagcgatttccctccatgcgccgaacaatgaactgcggacgagtattatgcgtattaacaagacctattcaattgagaaattgatggaagcaatccattattacgttaacaaaactaaccgccgaatcacgtttgaatacattatgctaaaaggtgtaaacgaccacaaaaaagaagcgctcgaacttgcggcacttctcggcgaacatcgtcatttagcttatgttaacttgattccttataacccggtggacgagcatatcgattatgaacgcagcacaaaagaagacgtacttgctttctatgatacgcttaagaaaaacggtattaattgcgttatccgtcgtgaacatgggacagatattgatgccgcgtgtgggcaacttcgtagtaaacaaatcaaacgagttggcgtgcgcgaacggatgaaacaaaaacaagcagcagcggaagaataatatgtaaactatctggtttccatttggagattggatagtttttgtttatacttaagttacctaaagcaattgaaggaggacaaaaatcatggaagtagaaattgtcgaacgaaatgcttttacagccgtcggaaaaaaacgaactttttcggttgaaaatgatgcgcaaaaagaaaaaatcagccaattttggcaagaagtaaacgcaaatggcgatgcagaacgaatcaacgaattagccgaattcgcaacaattgacggtattttaggcgtctgccaaatgaacggcgaccaaatggactattatatcgcgattgaatccgaactcaccccaccagcagacatggaaaaactaaccatcccagcaagcaaatgggccatcttcaaatcagtcggcccactaccaaacgcaatccaaaaagtgtgggaatacatttacggcgaatggttccaaacatgcaactatacccatggaaacgctccagaactagaagtctacacagaaggtgacacaactgccgttgattattattccgaagtctggattccggtggttgaaaaagactaacaaaccaaagaacaaatttcattgattgtgaaatttgttctttttaaatcccactccaaacccattccctaaaattgacattgagaatcattatcaatataatggaaggaactagcctattatacatacaatacaattatccaagggggatttaagaatgattattgtaactaatacgattaaggtagaaaaaggcgcagcagagcacgttatccgtcagttcacaggcgcaaatggcgacggacacccaacaaaagatatcgcagaagtagaaggtttcctaggcttcgaactatggcacagcaaaccagaagacaaagactatgaagaagtagtcgtaacaagcaaatgggaaagcgaagaagctcaacgcaattgggtgaaaagcgattccttcaaaaaagcacacggcagaacaaaagacactagagaacaaagagaagaccgcaaaggcatcgtaggaaatgcaatcgctcgttttgaagtggttcatgtgcaaaaccctgtgattgttgaaaaataagaagtgagtaaacaagccatttcgaggtagatggcttgtttttttgttttcagatgagaaaataaatacagtgtttttctttccaaaagcccctttactagcaacccacaatccaatcatgctataattctctaaatgataacgtttatcatttaaggggggattaaacatgattgaaaaaacaattatggaacgtcgtagcattaaaaaagcgaacgacgagccaatttcaagagaaacggtgaacacgattttagagcaagctgcctatgcgccttttcacagcaaagtagagccgtggaatgtatacgtattgcacacacttgctgaaaaagagcgttacatcgagaaaatcattgagtttaacgaacgcgaacaaggggttagtttttctgaagcagagattgcggatttaaaagcaggctatgcgaagaaaattattacgccgccatacttactcattgtgaccacgaatattatcggtcacgggaaaaaggatttcgaatcaatcggggcaactagtgcatttatccaaaacattcaattacttggctgggaagcgggaattgggatgatttggcggtcaaatagatttatttttgatgcgaagtttgcggatgatttaggtatccctgctgagcaaaaaattgtcggaactttgcacttaactagcttagccgaagttcctgaagcgaaaccgcgccgtccgttgaatgaatgggtgaagaatttagccgatttgtaagattgatgtttcgtgtgattagcgttacaatgatacaagtgtaagaaataaggaggcgagcaagatggcagttccagctagacgtacgtccaaagcgaagaaaaacaagcgccgtacgcataaaggcttaacaacaccaggtttgagtcgcgatagtgaaacaggcgaataccgtatgtcacaccgcatctcaccagacggcacttataaaggtcgcacaattatcgaaaaataagaggatttgttccagcgattggaacaaattcttttttttgtgatactataatggaaagagttaaatacacaaaaaggagtctgattttgacatgacagaagaatttgtgaacaaagaagatgcgctaaaaaattataatgtaaaagagtttcgtacaccagatggctatacgagcgatatgattttaactacagtaaaagaagtaaacgggaaaccaacattacatattttattaattaaacgaagcagtaccaatgcggaaggcagaccaaatatcgaaggcggaaaatgggcggttccgggcggctttgtcgatgaaaatgagtcagctgaccaagctgctgaacgtgaacttgaagaagaaacaagtttgactggtattccgttgattccgtttggggtatttgataaaccgggtcgtgatccgcgcggttggattatttcgcgggcattttatgcgattgtgccaccagaagctttagagaaacgcgcggctggggatgacgcggcggatatcggccttttctcaatgacagaagctttggaactgccacttgcttttgaccatttagatatgcttaaaaaagcgtatagcgcgattacggaagagtttttactgacaacagcaatttgtgatttcttgccagaaactttctcagccgaactactttaccaaacgttagatggttgcacgaagccaggtattttgccggatgaagtagaatttatggagaatatcgagtatttaccgtatttagaaaaagttggtgagttataccgatttaatgcggatgctgaagcaggaagtatttatttttaatagaaaaggagccaccgatttggttggcccctttttttataggaaatgctttttaccataacgtaatgcgaaatctttaaaagccttggaagcaggcgaaatgtagtggtttttcaaacttgctagatagataaaacgatcgtgttttggttcgttgatggataaaactttgacattgtagtgtgctaatgaggagatttttggcatgatagaaataccgtaatcaacactcacaagcccaaccattgcggtatcctcctctacataacagccgattttaggttgaatatttatttccgcaaaaagagaatcaataagcggtctcagcccactggtgtcagaaaagaaaatatacgaataatctgcggtgtcttgtaaatcaatcgaatcatatttggcaagtgggtggttttcggcaacgacaacaactaactcttgttttgttaatggtaaaaactcaatatcaggttcattttcgacgtaggagcaaatcgctaggtcgaatttttcattttttagatcagggataattgatttagtggcaccttggaaaaaggaaaatgtgatgtctttatggctttcgactttggtgaaattctggacgagctctggaaccgtatgggcgcccatggtgtaaataaaccctaaatcaatatttccgtgcgatgggctcgttaattcgtgtaacagtttttcacctttttctagttcggcgagggattttttcacataagttaaataaaagcgaccgtatttagttaaacgaatattgcggccttgtttttcaaataaatagacaccaagttctcgctcaagctctgcaatagagtggcttaagctgggctgggtaatggataattcggcagctgcaatagtataatgctctttttcagccagctttttaaaatagtataattgacgcaaattcatgaaactacctcctcggaatgccttgataactctattgtaagcgattgtatagaaaaaatctatggataaatcgaaaaatatacattagattaataattattcctgacttataatgaaagagaaataagattgtgcattattgaacgtgaataatgtaacaaatcatttgctgagattatagtcgcaggaggcttattatgacagattatccgagtatttttgaaccattaactgtaaaaagaatgaccattaaaaaccgtgtgataatgccaccaatggggacaaacctagctggattaaatggcgaatttttagaagaacatatgaattattatgaacaacgcgcaaaaggtgggacaggtctaatcactattgaaaacgcttgtgtagattttccttatggtacaaacggaacaacgcaacttcgaatcgataatgaccaatacattcctggattttacaaattaacagaacgtcttcataaacatggaacttgtgtatccatccaaatcaaccacgctggagcatctgcttatccagcacgtttgaatggacttcaaccggtttccgcatcagatattccatctaaaaaaggtggcactgtaccgcgcccgcttacagtagaagaaatttatgaaatcgtcaataaatacggagatgctgcaagacgcgcccaacaagctggctttgatgcagtcgaaatccacggcggacactcgtacttactatgccaatttttatcgccactttacaacaaacgaacagatgaatttggtggaacgcctgaaaaccgcgcccgtatcgtcaaactaattttggaaaaagtccgcgcggaagttggtccatttttcccaatcgtactgcgttttagtgcagatgaatttacagaaggtggcaaccatttagaagacattttggaactgctagattattgccaagaagaagcggatattttgaatgtatcagcggcgattaacgataatttatacttgcaaattgaccaaatgaacttggaagatggctggagaagctaccttgcaaaagcggtgaaagataaatttaacaaaccaacgattacttcggggaacatccgtagtccaaaagcagcagagaaaatattgtcagaaggatacgctgatttacttgcgatgggacgtggtttaattgctgagccaaactgggtgaacaaagtagcaactggccaagaagatatgcttcgaaaatgtatttcttgtaatatcgggtgtgcggatcaccgaatttctaagtcgaagccaatccgttgtacggtgaatccagatattattcatgaagataaatacaaagaaacaaaagtaactcgtccgaccaatgttgtcgtaattggcggcggaacagcagggcttgaagcagcttgtacggcggccgaagttggctgtaacacaacgctaattgaagcgaatgaacaaactggtggcttggcgcgtgccattgctaaccttccagacaaaagtagaattgccgatttccctaattatttagcgaaccgagcagaaaaattaaccaatttaaaagttattacaggcactaaagctgatactgcgcttattgatacatttaatcctgatgtggtagtaaatgccacaggatccaaaccattacttccaccaattaaaggtttgcttgacgtgattgacaaagaaggcagtaaagttcattcgattttcggacttatttcgaatatcgatgactttaccgaatttagtaacaaaaaagtagcagttatcggcggtggtgcagttggacttgatgtggtcgagtacttctcagaacgcggctcggatgttacaattgtagaaatgatgccgcttcttggaaaagacttagatatgattacacgactttcgatgatggacattattgagaaaaaccacgtcgatgtgcaaacagaaacagcattaaccgaagttgcagccgatcatttcaaagtgaagcacgacggagtagacgccgagattccatttgattacggctttgtctgcctaggaatgcgaccagaacgcccacttatggaagaacttgcggcttacggcaaagaaaaacaaattgaaatcgtaaatattggcgatagcgctgcaacaagaaaaatcttggaaggcgttcgcgaaggaagaaatattttaactacattagaaaaaattggctctttgtaatccgaattggcaaggcggactccgctttgccacattcgctctttatataagttcacattttcacaaataaaccttaatttggaaaggaacgatgttattatgacaaacaaaatcacggaaagaattacaggacacacagaattaatcggtttaatcgccactccaatcagacacagtttatcaccaacaatgcataatgaagcttttgcaaaactcgggcttgattatgtataccttgcttttgaagttggggacaaagaactgaaagatgttgtacaaggattccgcgcaatgaacttacgtggctggaacgtttccatgccaaacaaaacaaacatccataaatacttagataaactttctccagccgctgaacttgtaggggcagtaaatacagttgttaatgatgacggcgtattaactggacacattacagacggcactggctacatgcgtgcgttaaaagaagctggacatgacattatcggcaaaaaaatgacgatttgcggcgctggtggtgcggcaacagctatctgtatccaagcagctcttgacggcgtaaaagaaatttctattttcaacagaaaagacgatttttacgcgaatgcagaaaaaacagtagaaaaaatcaattcgaaaacagattgtaaagcacaattatttgatatcgaagaccacgaacaattacgtaaagaaatcgcagaaagtgttattttcacaaatgcgactggcgttgggatgaaacctttcgaaggcgaaacacttttaccaagtgcggatatgcttcgtccagaattaatcgtttcggatgttgtctataaaccaaccaaaacaagattgcttgaaatcgccgaagaacaaggctgtcaaacacttaacggcttaggcatgatgctttggcaaggtgcgaaagctttcgaaatttggacacacaaagaaatgccagtagattacattaaagaaatcctattttaaaaacttgcaaaagaacaaggttatcgctaatcttaaaacataatatcgaatgaggagaattatacatgaataaagtagtcgtaaagaatgttacgtttggtgaaggtgcgccaaaaatttgtgtaccaatggtcggtaaaacggttgctgcgcttaaagaagaagcagaaatgttacaaacaattgatttggacgttgtcgaatggcgcgttgacttttttgaggacgtaaaagatttagctaaagtggaagctgcacttggcgaaattcgcgcaattttaccagaaacaccgattttattcactttccgcagtgcaaaagagggcggcgagttagctgtcagtgacgaattttattttgaattaaatgaaacactagctggcactggcaaaattgatttagtagatgtggaacttttcaatgaagaagcggacgttttacgcttaattgaaacagctcacaagaacaatgtaaaagtagtgatgtcgaatcatgattttgataaaacacctgcgaaggaagaaatcgtttctcgcttaactcgcatggaagcacttggcgcggaccttccgaaaatcgccgtcatgccaaaatctgctggagacgtactaactttactagatgcaacgaatactgtatttgaaaaagctaatcaaccaatcattacgatgtcgatggctggaactggtgtcatcagtcgtcttgctggcgaagtatttggctccgcaatgacatttggcgctgcgaaaaaagcatcggctcctgggcaaattgatgttaatgagttacgtcacgttcttgatttactgcataaacaattttaataaatactaaaaaagtagcaagtttctttgatgaaaagaaacttgctacttttttatctagaatgaattattttgttaatagactactttttataaacgaaaataattcttgaagcagtgtattttcgctctgtttattaatggctgcgacaatattctggtcattccgttcttcttgaatatccataattttaatattgtacttatcttctaatgttccatcattcatgccggaatacaaaaaggctaatccttctccaacagatgtcattgctagtccttcatccagatcttttacatacgaattcgcttttaaattaaaaccatgtttagtacattgactaacaacatagtctacaatgatgggagactgttttctttcgagcaaaataactatttcttgcttcaaatcattaaaatatacttttttctttttccggaatcgatggtccgcgggtatagcaatttgcaaatgattttttataaataatacttcttctatagacatgttcggctggaaataagcggataaattaaaaactaaatcatattgcccattagaaagaccttcagctaaattcattggtgtatccggttttaatgagaattgaacatgtggatgactttgcttgaatgattcgagcagctcatacattgcgttcatattgaaattcgagagataaccaatctttaataattgtccagcttcatctgctgttttttgattatcaaacatatgggatagcttgttgactcggtttaaaatatcatttacttctattaaaaattgttgacctgcacttgataactccagcgaatgacgattcctaataaacagttctacacctaattctgtttctacttcttttattcgtctactaagggtaggctgtgaaataaataatttttcagatgctcgggtaaaacttccttccatagccacatcaacaaagtatttcaaattggataacttcataattgctccattcaatgaaagattgtaaatagtagctttagtataaagttattagactccattgacaagtttttctatttgttgattattggtagctgaatataggatgggtgctctttactcgtatgaaggatatgcgtacctttattattaggtgtgcatccgggcgttcctggcattactgagccaagttcatctttgctactcaggactactctgagtgtttcacctgctttataagttagaccaatgggactcaaaataatgtctagttctacaatttctccggaagagagtttttctactttgtcaaagctataagcaggaatttcatctgttgaaacttgagaatctagttgtcgcatggatgcgcgaagtcttccccaagcgcctttatagcgtaaagcagatgccccttcttgtgtgaaatcctgaagtgcggccccgtgatttggtacgacaaattcacttagtacgttgccgaatttatctagcttttgaagccaaacaaaaacatccaagtcatcgtatccatctacttccataaataattttgcttttggataaccaacaaaatgcgtttctttgtcaaacgtcatttggaacgatgctctccctggcaagttttcagtagtataggatactttaaaatcatctgaagtaggtgtttcttgtaaagtacgtaataggccattcatataataacgtttgttttcactattggtaggtggaaaaacttcggatggtaagtcagtttgattgccaccttgaaagtcaattaatgcatagcgcacagttggtgtatctgtccaattattttccttgccaagtaaataataatcaaaaaagcgtcgcaattcttctacgttattttcgtcatagtaatatggccattcttggcgatcatgaatacgaagccatttttctttagaaccaagtgaacgccaagaacgaaatgtacccattgtgtgaagcgtattagaataacttgcaataacaaaagctggtattgtaattttacttggatctgcaactttgtctttccaaatagcactatcagctaaaggatatgcttccatttcctttgttaaatcttctctttgcgaatttttagcactgacatggttgatttgcaaacgctcaataaaattaggatctggaatgcctccaataaaagctaagtcacgataaccatctgctaatccttcagtaggattgatacatgttaggtgagggggctgctcagctgcaatataccactgggaaaaggctaaataagatgttcctgttagagctgtttttccattactccaagattgcttagctaaccattcaattaaatcataaccatcttcagcttcttgagagccaatcattgtagtattaccctcactatgagcaatgccacgcatgtcaggattacagacagcgtatccatgtgcgcaccagtatgctggatcaggtgcttcaaatttggtaaggccagaattccaggcattccccattcctagcatattaaatagatttttgtatcgaggagctgttccagcgctttttccataagggctccaggcgataagagtaggaactttttcttctgttattggtaaataaatatcggtataaatggttataccgtcacgcatcttaactggtacatcttttaacattttaatggaacaatccagtagtttgaaaccttcagcaatttgttgtcctttttctaaaatgatttcttttgtttcgaaaggacttagcactccatgctcgatgccattatccacgtattcaaaagaagggctgaaaagcattttttctgttatttttgcagtcatataaattacctccgattatttttttaataagttttaacacttttaagtataggtagtatcgcgaggtctgtacaattgtaattttggataaactctcctaaaaaaataagctatgcaaaaaatgaatacaactaaattgaagtttttttgttataataaggcatcaggaattttaaaggagacggaactaaatgaagaagttgctttttttaggggatagtgtgacagatgcagggcgcgattttgaaaatgaccgcgaattaggacatggttatgtgaaaatgattgcagaacagcttgagaaagaagatgtaacggttataaatcgtggcgttagtgcgaaccgggtggcggatttgcatcgtcgtattgaggcggatgcaatttcatttcaaccagatgtagttacgattatgattgggataaatgatacttggtttagttttagcagatgggaagatacttcggtgacggcatttaaagaagtatatcgtgtgattttgagccggattaaagaagaaacaaatgcggaacttgttttgatggagccgtttgtattaccttatccggaagatcggaaagagtggcgtggtgatttggatccaaaaattggagctgtgcgcgaacttgcggcagaatttggtgcaacgcttattccgcttgatgggctaatgaacgcgctcgctatcaaacatgggccgacctttttagctgaggacggggtgcacccgaccaaagcaggacatgaagcaattgcctctacttggttagaatttacaaaataacgctttacagaaaaaattatccatgctatagttgggtctatgcgatgagcctacaagcagtgacttaagtatcactgccccattttccgcgttatagctttgtggaaggctgcggaagatgacgctatgaaatgccccttaaagtaatttaaggggcatttttctataaaaaaggagtgtttgttttgcagaaagagaaagcaccgataggactttattttttattaattgcagtgatggcgagttggggttttaatgtcacgatgacgaaagtattagttagctattttccgactgttacgatgacatcttttcggattttcaccgcagctataaccgttattatcattttatttatcacaaaaaaattacgacttccgacgaagcaggaatttggtttaattttactcgcgagtatttttaatattgttattcatcattttttcttgtcgaacgggttgaagctgacgactgggacgaatgctgggcttattcttggttctgcgccgatagtggtagcgattttttctgtaatttttctccgcgaacgaattggtgcatggcgggcgctcggctttttagcagggatttttggcgtgagtttggttgttctttctaatgggacggggataagcgggatttcactgggagatatcgacatctttatcgcgatggcttctcaggcatttagttttattattattaaaaagctcgctggatcaatggacacggggctgatgacgggatacatgttatttcttggttcggttatgttgtttggtttaagtcgcttcatggagccggatggcatgtcagaattagtgacggttcattcatggaaactgtggctcttgtttgttgtttcagctgtagttgcaacggcatttggcaatttcgtttataattatgcggttgggaaaattggaccgtcgcgctcggctatttttatgaatttcaatccattattttcactaattggcgcattacttttccttggagaagcaattaaaatcccccagctagttggcttcggttttattattattggcgtcctacttggttcgggtgcattaatggatcttatttatgaacgcaaaaaaacaaaagtacgcgatcctgaaaagctgctcgaaaaagaagtttgacttttattgacctttatattataatttggttagttacttattaaaagtaactcgataatgataggagggatagcatgaaattgttattaaaaaatattaatgaacttgctgcaaaacaaaaaagtgaaggattaactgcttttgaaaaagaaagacaagctgcccttcgtcaagaatatttgaagaaaattcgaggaacagttcaagataatttacatcacgtaacaattattgatccacttggagacgatgtaactcctaaaaaattaaaagaaatccaagccgaattaagaggctgatataaaataaaaaaggttgaaaaagcgagtgtcgctttttcaacctttttttattcacttattatttgaaaagataaattactaaacggcgttgtaaaatacgcctttatttgataactgttattttgaatgaggagtggtgtgttgttagaagatacaatttcttcaaagtctctatctttaccaacgcgctttcgatttttaaagccattaatttctgactcaataaataaatcccaaatacacgtgtggttaaagagagtgctatctacagcatagattccccgctctgttgatagcatttttaatggtgaaatccatatttctagattgccatcacgttctttcaagcatagtcgtaatgctgtttgaaaccttgtcagaagggattgctctagtgaaatatcaagtaagtaattattgttttgtaatgtaactgaatgcaactgcactttagaactatttaagtggttaatatcgtacacgtcatcgtaagctaactgaggtcgcatcttgcggaaacggccttttatataaccattttctactttaacgacttggtttttagaaaagttttccatttgcattcgaacatctattaatttttcaggattattttcagcaataatatcaatcataaaccgtgttttagtaggaagttcatttttcattttttcatcaagatggcaaacaattgtatctttcatcacttgtacaaaagttttttgcctttctgacatatttttataatcaaggttataattgccagtaatataatcattgaaataacgttgaatgtaagcgcgaatcaaagtttttttgtaagttggatggagtggagaagcttcgatttccttgacgactgctggaacaactttacagatttctcttggatccatttttgattctttaatactaagattctcatcgccccgagatacaacgtaataatagtcataatcggctaaaacggtgattactttggcgttaacataagctttcatgacaaaatattggtcctcgccaataagaatattcggatcaaagtaaatctttttcgttttcaaaaatgcagtttgaaacattttgtggggagcaagtgtataaactaaattatcagctaaaatatctgcttcatttctattgccctttttaaactgagattgaggaactcctcggccatttatgcccacatatttcccgaaaataacttctgattgatttttttcagcttgaataaataagcgttccaatgcctcttcaccaagataatcatcgttatctaagaaaataatgtactttccttttgcttctttaattcctttattacgtggaatcattggaccgcctgaatttttatgcaaattaattatccgcatgtttttatggattttgctaagttgttttaattttccaaggctgttgtctgtggacttatcgtcaatacataaaatttcaaattcattttgtgctaaagtttgattttttaaactggaaaaagctttttctatataattttccgcattataaatggggataattacagatatttttatcatttgtatgctccttctgctagctagcaagtacttactactaatagagtataaactagtttaaatataatatctactaagctaaaaacaaggtttagaatcaacttgtgtaatctttattggaaaaatggtgccgaacagttctaacagtttgatggagaccggtgctacaatcaaggtgagaaaggagaggataacatggaaattgcaattgcagctgaccatggcggatttcagttgaaagaaaaaatccgcgcgcatttaattgaaagcggctacacagtaaaagattttggttgttattcgttagaaagcgtggattttccagagtatgccgctaaagtaggacactttgttgcaactgaaaacagtttaggtgtgctctgttgcggaacagggattggaatgtctatggcagccaacaaaataaaaggtgtgcgtgctgctgtcgtttcagatgctttttcagcaatgatgacgaggcgacataataacagtaatgtactttgtcttggtgaacgtgttcttggcgatagcctggcgttgcttctattggatacatggctcgtggcagaatttgaaggcggtagacataatacaaggctccaaaaattggcggagcttgaggaacgggaggaagataaatgaaaatgattgcggcttccattatgtgcgcagactcgcttcatcttgctgacgaactccgagccctcgaacaagcaaatgtaaaaatgctccattgtgatgtgatggatggtgtttttgtagaaaatgcagcaatgggcgcctatgtccttcaagatataaaaaacaataccaaaatgctactagatattcatttagctacagtgaatcctgataaatttgtggatttgtatgcggcgataaagccggcttatatgtctttccacctagaagcttcacgtgatgtcaatgcgactataaaccatattcgtgagctaggaatcagaccatccatcgccatcagcccggatacagagattgaacagatttatccatttttaggtaaagtcgatatggttttaatgatgaccgttaacccaggattcgccgggcaaaaattccagcatcatgtactagaaaaaattaaaaaacttcaaaaagagcttgaaagccacactaataaaccattaattgaagtagatggtaatatttttgaagaaacagttcggttgcttgaaccaattggcgcggacgtctatgtcgttggaactgcagcgttatttaacgaaaaggcaggtagttacacagaaaaactagcgccactaagagaaattatccaagaaaggtgagagaaaatgcatttagattcagctaatttagacgacgtgaaaaaaattcaagccagctccatttttaaagggattacaacgaacccaaccattttagtaaaagaaaaatgcaatcgccaaacagcgattaatcgtattttagaacttacggataagcaagtttttgtacagacagttggttttacgtatgaggaaattttggcagatgcccgcatgttattaacgatgtttgggaaagacaagatagctattaagattccggcacatgaagctggtactaatgtgatagatacactcaaaaaagaggataaaaccattcaaatcttaggaactgctatttattcggctgatcaagcaatcacggcggccttggctggtgctgatttcgttgccccatatgtgaatagaatgagtgcagcgaacatcgatccttttaaagagatcacccaaatgcgtcacttttttgataaaaaggcacttaaaacacagattatggcagcgagctttaaacatagcggacaagtaatgcaagcctatgaaagtggcgcagatacggtaactattccttatgaaatctattcgcaaatgaccaataaagttttagcagtagaagcaattcgtgtctttaacgaagatgctgtattgtacgaaaagtaacaatctccttctcatgttgtggaagtgtttggagaaaacttgtgatgaaagcgcattcttaagcaccgaaccctatgctataattaggctatcaaaggggggagacgcatgtatctggataacagaagtaaaacactatttcaagaagttataaaaaatccgaacattacaaataaacaactcgaagtaaagtataaattatcgcgttaccaaatcagctatagttttcagaaagtaaatgaatggctcaagtggaaaaattatccagaagtaaagcgttccaaaaacggcagatttatattagaaccagaacttacggcgctattttctgagaaagaaactcgagatccgagcgtagaatatttaccttctgaaaatgaacgtgctaatttgattttgctgatgcttttaacatccaaagaagaactatccctcgcccattttacaacgaagattcaagtaagcaaaaataccattcttcgtgatttaaaagtagcgcaaaaattactgcctaaagaaactactgtcacttacagtagagcatcaggttatcagttagcaggaagcgagtgggaactgcgcaaggttttgacacaagttgttagtagtgtgaaagagatgttccgaggagagcactatttcctatcttattcaggaattgaaaaagtccaacttatggaaatccgccgcacactcgaagaagcagaagcgatgatgcaaataaaattcacgtacgagcaaatcgaattactaccatatttgctatccgtgatgttcttaagaatcagagatcggcgcttaatcgatactgcttttcatattgatgagaaatcactttcagacactcgagaataccacattaccgatattttgctcgaaaaaaccggcccagttccagaacaagagcgacttttcatcacattacaacttcttacaacaaacattttttccggcgaaattttaactgaaaaattaacagaagacttggaaaaagttgtcctcacatgcttagacttattcgagaaaaaagcactagtttcacttaaaaacaaacacatcttaatcgaaaaattactcttacatttaaaaccagcctattaccgaattaaatatcaaatgaatttagaagatacgctttatgaaaaattcaaccaagaattcgaagcgttaaacttcattgtgaaagaagcttttgacccgcttgctaaatttattggtcgtgaaattccagccggcgaaattttcttcatttctttgtttattgggagcgatatgataccacaaaacgatatctatcataagcaaaaacgtgcgattgtgctctgtccgagcggggttactttttcaaaaattatggaaaatattttagtaaaactattcccggaaatccatttttatccaactatatctgttcgtgaatacgccttttttaaagcagaagtagacattgttttttcttccattccattaaaagatggcgaaaatgtctttgttgttcagccttttatgaatgatatcgaaaaaacgcaactgcggcaacacgtcttgcaaaatttatttggaatgggaaatcagctcacgagtattgataaaatcatggaagtagtggaacgtaacgccgatataaaggatccgaatgcaatacgagatggaattattgatattttgtcggctaacatagctacagatgaaaataaacgcgtgaaaaaagtctatttacatgatttaatcaccgaagacaacatcatgatttgtgaggatgttaaaaactatcaagaagcgattcgtctagcgagtcagccgctgttattgcaacaagcaattacagcaaactatgtaaagaccatgattgataaccataagttccacgatccctacattattatcggtgaagatattgccattccacacgctatgcctaatgcaggggtcaatcgactcgctatgtctcttttagtcgtgaaaaacggtgtatatttttcagaaacagaacaagttcatttcgtaatagttatcgcaccagtggataaagagcaacacattgaagcactttaccaaatcgttcatttagccgaaaatcaccaaattttagacgatttgctcgaaaatgtaacgaaagaaaaaatcatgcaaacaatcaaccaattagtaattagagaggatgaataaattttggataaacaagctattttaaataatattcaccaaacatggcaagaagaagcaaatgcgatttcacgtttgccggaagtaacaagtgaagaggctctcgttaaaactgttgaaaaaatcgccgagtgcactgggaaaattgtcgtagctggttgcggaacttctggcgtcgctgcgaaaaaattagtacactctttcaactgtatcgaacgtccagcagtctttttaaccccatcagatgctgtgcatggaactctcggtgtacttcaaaaagaagatatattgattctcatttcaaaaggtggaaatacaggcgaattacttaatttaattcctgcttgcaaaacaaaaggaagcacactgattggcgtaacagaaaacccagattccgttatcgccaaagaagcagatatctttttcccggtgagtgtaagcaaagaaccagatccgtttaatatgttagcaacggcaagtacaatggctgttattgcaagttttgatgcagttattgtttgcttaatgacctatatgaattacacaaaagagcagttttcagtcatccatcctggtggtgccgttggaaacaaactattaaataaataaacaagcagccagtcggagggatgcaatttggatgtattagaatattttaaagaagagatggttcgattttcaaacgaacaaaataaagaaaaattacttgcagaaatggctgaacagttgtgtgaagtaggcgcagtaaagccaagttataaagatgcagtaattaaacgggaaaaagtttttccaacaggattactaactgcgcacgccggggtagcgattccgcatacagatagcgaacatgttattcggccagttgtggctgtacgaatactcaagaagccagtttcattcattgaaatggcctctgataacgaagcaattgatgtcagaattgtttttatgatggcgctaaggagtgctgatgaacaactagatatgctgcaaacacttattcaacttattcaagacgaggaggtgatgacgaccttacttaaagcgcaagaaacgggagatgttctttccgcaatagaacatttttctaagaataattaagggaggtcgggaatagatggggagtttttttgcaagttttgtagactggctaataggaagtccaggtagatttgtcgttaacttaattgaagataatatgctgatttttatggttgtagtaatgatttacgccaccaccattttatacgccaagtggacactcgcatactacttaccgaaaaaaatgagtcagttagcagaaatgaaaacgtgggagctggacgaattatatgcagcgtggcaaacagagaaaaaagctctaccgtggtacattctcgtgccaagccgaaatgaattttgggtaaaatctgcccgaaatgcaccagaatcaactaaattactccattttagtcaacaaaaattaaaactaagtgacaaagaaaagttacaaaaaatcatagaaattcaatcttgaggtgataatagtggcaaaaatagttccgtctgtttttggagcagacattggcagaattaatgaacagttacaagtcttagagaaaaatgacatcgatttattacatgtagatatgatggatggctcgttcgtcccaaacattgcttttggtcctgatcaaatcaaaatgatgaaaaaaggcacaaaactccaatttgatgtgcatatgatggtgtatgaaccagatcgttacattccaagattagtggaagcaggtgcacatatgattacagtccaccaagaagcgacaactcatttgcaccgtacaattcaactcattaaaagttacggagttcgcgcaggagttgtgttaaatcctgggacaccaccaagcactttggaatacgtgttagatgatattgactgtattttgcttatgactgtaaatccaggcttaggcggtcaaaaattcttccaatcaagtttagaaaaaatcagaaaaaccaaagcgtatattggaaatcgtcctattcaaattgaagtagatggcggagtaaatgacgaacttgcgaaagaatgcacacttgcaggtgcggatttaatcgttgtaggatcttatttatttgaaggagatatcgaagcgaatttggaaaagttagcgaaaggagttttaacagaatgaaagctttaaaattatatggaaaaagagatttgcgttatgaagaagcggatatgccaacaattgaagagccagatgatgttattttgaaagtgaaaacagttgggatttgtggttcagatatttcgagatacagtaaacttggtccgtatgtaccaggaatggtatggggtcatgaattttcaggggaagttattgaagttggtagtgaggttacagatattgagattggcgatagggctgccggatgcccagcactctattgtggagagtgtgaatactgtaaaaaaggcgaattcgcccgctgtcggaagctaacagtaatcggagcaagacatcccggagcctatgctgagtatatcaaacttccagcagaaaatgtagtgaaaataccaaacgaattagattatgaggctgctgcacttgtcgagccttccgcagtggtcgttcatggattttatcatacgaaattacaagcaggcgatgatgtcgttgttgtcggaagcggaaatatcggtttgctagcaattcaatgggcgaaagtctttggggcaagaagagtgatagcgattgatgtagacgataaaaagctagcacttgcgaaagaagtcggagcagacgtagttattaactctttaaaagaagatcctttagaagtagtcgcagcacatacagatggtctaaacgctgatttagttgtagaagctgcgggatcacctattacatctgcacaagtttttgcctatgcgaaaaaaggtggaggcgtagtgttcctcggaattccatacgccgatgtaacaatcgaacgtttttactttgaaaaaattgttcggagcgagcttactgtatggggttcatggaatgcgatttctgcaccgtttccaggaaaagagtggcaaacaaccattcacttcttagccaataaacaaatcaacattgagccaatgattacacatcgtctttcacttgctgaaggaccagaagtttttgagcgaatctatgaaagaaatgaatttttcgggaaagtattatttttcccagaatgatagggggattttaagatgaaaaagaagcgaatttatgtatgttgtgggactggaattgcaacttccactgttatttccaaaaaagtgcgtgcggttttagatgaaaagcgcattccatatgaaattagtcaatgcactgttcaagaggttgcatcaaaagtaagtacatccaagccagatattattgttagctcaacgactgttacaggagatgttggtgatgtcccagttgttattggaagatcatttttaacaggcttgaaaaaacaagaaacaatcgatgaaatactcgcgatacttcaagattaaagggagggcacaaaatggatattattctagatttctttaaatatattatcggccttggtgtaacagttatgatgccaattatcattaccattctaggtgtgattttccgcaagaaaattagcgtagcttttaaagcgggattaacagttggtgttgggtttgttggattaggcgttattacctcgctcatgttaacgacaattacaccagtaacaaaagcactcgtagaaaattataatttcaaattaaccgcgacggatatcggctggggagttgggtcatcactcgcatggggaacagaagtcgtgccttttgttttcgtcgcaattattgcaaccaatattttaatgattgcctttaaatggacaaaaacaatggacgttgatatttggaactactggcaaccacttttcatcgctagtgcactttacttaacaacaggaagtatgattattgcggttcttagttccattatcaatatggcaattatcttcaaaatcgctgactggacacaaaaagatgtagaggatgtattaggtttagaaggaatttccttaccacaaattcaaactaccgggtgggcgcttgttggttatccaatgaactggctactcggaaaaattcccggcgttagaaaaatcaattggtccacagagaaagtgcaatcacgtttaggtattttcggcgaaccaatgcttatgggcttaattattggtggtggacttgccgccattgctcaaatgccgctgagccaagtactgcaaaccggagtaacgattgctgctagtttagtacttattccgcggatggtttcgcttctaatggacggacttaccgttatctcagaagctgctcatgaattcatggaaaaacgttttccgggtcgcgaactatttatcggactagattcagcagtgggaatcggtcatccatttgtactttcgcttgggttactcatgattccgattactttaattttagcgttcattttaccaggaaataaagtattacctttagctgatttaacggcgctaccattctacatgatttttgctattgttccatccaaaggtaatttatttagagggattttcacaggtattgttatcgtcattatcaccctctacctatcaggagcagcggcacctttaatgacagaactcgcaggtcaaattggttataatataccgaaagatgctgtagaagtaacctctctagcagttggaacacagtggtatacatggattgtatactacggacttcattggtttggaggtattctataattgcaatttaatgaaacaagcattagttcgcgctaatgcttgttttatttggaccaatgatttttagctagtagacaacacattgacagttctatataataataaggagaagaaattagtatggcggaaggagatagcaatggcaggcaaaatgaaacttttttctgtgacgagtgagagaccacttgcgacaaaaattgcagattatttagatatacctttatgtgaggtggagctccagaagttcagtgatggagaagtgaaaattaatattgaggaaagtatccgtggaacgaatgcgtatgttgtgcaatcaatgaattccaacgtaaacgaacgtctaatggaacttttaatcatggtagatgccctaaaacgcgcttccgtgcattccatcaatataattatgccttattatggctatgctcgtcaggacagaaaagcgcgctcaagagaaccaattaccgccaaattaatggcaaatctaattcaaagagctggagctaaccgtttaatcacagtagatttacatgcagctcaaattcaaggctttttcaacattccaatcgatcatctttcagctattccgctaattggtgattatttgatagaaaattacggagaaaaagacgtggtagttgtcgcgccagatcacagtggcgtagttcgcgcacgcagaatcgcggaccgtctaaacgcgccaatcgccattttaaaccgtaaaccaagaccacatgaagacgaaattatgagtgtcattggtgatgtgaaaggcaaagtcgcaatcgttgtcgatgatattatcgataccggcgtccgtgccaccacttcagctgatattttacttgaaaaaggtgccgtagaagttatcgcttgcgcaacccactccgttatggctggaaacgcaaccgaacgtttacaaaactccaatatcaaagaagtcatcacatccgactccatcgatcttccagaagacaagcaattcgacaaactaacaaccatctccatcggacgaatcttaggccgcgcaatcgaaggcgtacaagaaaaccgctcgttgcatccgttgttttaaagaataagcagaaaacagtaacttagtagagttgctgtttttttgttatctgtcgacctcgagtagcgtgaaaaataccggggatcgacagaaagttgtaaatggttgggggaaggggaatttggcggtatttgcttggggaaatcttccggataagaggagattttagatgttttttggtaggtcgacagaaatagctctttgaggtaagatgggagtaagaagaaaagttagtgggttttagttacttattgtgaaatgtaaatcgataaaaaagatattagtaatttatttgcaatttagttttagttacttattgtgaaatgtaaattgctctcttttgtgtaaagcacatcaagcatgtagcgttttagttacttattgtgaaatgtaaatgcgatttttgtcaaagggacagcgatgggttacaagttttagttacttattgtgaaatgtaaatttaccaccaaagtccctacactcaataccaccaaagcgttttagttacttattgtgaaatataaatgaaaacctgttatacataggattatctatttccgttataattattccttgcaaataaattccaaaaaacaaacccctcattaattgggtctgtttttttgtgaataattatagtcaaacgagcaatctgttaacaatttagcaataaacgcaataaaaagccgttttttcactatggattgtactataaaacataatctacctatgctaaaatttaagggaaggtaagctgaataatacatataaggaggactctactattgaaaaagattctagtgcccatattattgttagcaacaatcttagcaagctgttcctcgccgaatgaaaaaataaccaaagacactaaaatatccaagactattacaataagagcagattacaaagttccaaaagatattaaagaacttgaggatgatagtgctaatattgttaaagtaaaatttcttcaaaataaaacgataggcaaggatggtagtactatcagcgagatagaaattttgactagttacaaaggaaacctagaaaaagggagtaaagtagatatttcagaaccgtggtatttaagcgatggtaaatatgtcgctgttgaaaactatattgcattagacaaggaacaagaatataccatctttcttggtgaaaaagataaagacacatatcctcttagtagtttgggttatggtaaatttggtggaagtctaaaagaggaccaagctgttctagcagatttcaatattcttggagaagtgcaaaaatttgattttatctcagagaatacagaggaagtaaaaaattatcaattaattaaagagcaagtcgcagggaaatataaatgagtaaacttgaacacctgattattaatcaggtgtttttttagagaaatctcagttgcgcaaaccttagaattcggtcataatagaaaaaaatgacaggggctgataaattgattattgatgtattgcaacatgtgccgcacgaaggacctggacttatagcgaattgggcgagagaaaatcagcatcagttaaaaatacattctctatttgaagaaaatgctcatgttccaaatgactcggattttttaattgtacttggaggacccatgggaataaatgatacagcagaatttccgtggttaaaagatgaacgtaagctaataaagcgattaagtgaacaacataaacctgtttttggtgtctgcctcggtgcacaacaaatcgcagcaacattcggaagcgaaatcactgtaaataaagaaaaagaagtaggctggtttcccgtcaaaagaacttccgacaaattattgttcttcccaaaatcattaaatgtgtttcactggcatcaagatacgttcgcattgccaactggatccacgcgtttatttgctagtgagggttgtttgaaccaagcttttttgtacggagaaaatattatcggtttacaatttcattttgaaatggaaaaagcggggattgagacgattttgcgaattgatgaggcatttatcacacccggtaaatatgttcaaagcgtggaagtaatgcgagagaaggatgttccagaagataataaacaaatgcttgaggctattttagattatttaataaacccaaaaaccatctgacgtgaaagtcagatggttttttctttagtatccagtttcaacagaagcattgacgatatacattaaatcgttcttgtcctctttgtcttccaagaaaatgccgcttgtagtcatcattccgccagccattttctcaatagttacggtgccataagggataatcgcgcgaatcgtatcctcatcgagttgatctgcgtcacacggtagcgccaatttgatattaacgaccatgttttgtaagtcaccatctggtaaaagcccttgaataccgggcatcgagtttgtgaaaattgcattccttacagctcgttccgctgctttagtgatgttttgaccgtggacatcaacgccaaagcccgtttggataaatagaatttgttccatcataaatcactccttaaaatcttttataaaagcggcacctggtcggtttttcgcatagccttccattacttcagtaaaatgcattccgtctgtatcggcggaattggtgaatatttcggacatttgtttgcgttgtgcagcgccaagttcgttttcgagttctttacctgccgaagttaggaagatgcagcgttggcgtttgtcgcgtctgccttgctcaatcgtgagaagttcgcgctctttcagttcagcgagcggctggtgcaaggcttgctttgatatctctaaaaaagttaagagttcattaattgtaagtccaggcatccgcgctgtgaaaaataaaatacgatgatgtaatcttttgagtgaatgtttggcaataattaaatcagcggtctctgtaaatgctttatagccgaagtaaaataaagcgatttgttgattcatgttttgctcattgttcataaatatacccctttttctgtcaatatcaacagtatagcataaataaggggacacaataacagttagcgcatcacttttttagaagctttttcgcattattaagaagatattttctgctaaacaaaacatctaatgtataatattagtattcgaaaacagttaattgtgtacaaaatgttacgttgatataattttcagatttcttttatttagacaaaaaagcgctaccattgcttatttaaagcgattcctataaaaataagagtgaataatatgaatattaaggcaaatcaaacgtgaaatattttatgaaaacgtattgagagttagttttaacgcggttatactttgggaagaaattaaccactaaggagagtataaatgaaaaaagcactgaaactatttcttgcgacgatttgtatgttcataatgatatatccttccacagcagctcacgcagaagaaacgaatattgttaatattcctgatgcaaatcttaaaacctatcttaatggtctgctcaagcaagcaagtgatgcaccaattactaaaacacaaatgaacactatccaaactgttacactttctggcagcacttatacagacttgacgggtttggaggaagctggaaatctggtaacactatctcttaacaatactaacatccaaacacttgaaccgattaaaaaccaaacttctttgacttacttaacagtgggcggagacaatgtaaaagatagtcttttcgtagatttaaatggacttgttaatttacaaagtcttagtatcaacggaagtgaagtgacgcataatgtctttaagactttcaataagttgccaaaattaacttatctctatgcgcaaaactccatgaaaatcacagatatttccgcgctcgcttccttaccagccttaacaacacttttcttacaatttgacggcattgatgattttagacctttaaatgattttgaaagttttaaaaatggcaacttgaaagctcttgctgcttttgggcaaaatacagggcgcacgaatccaagaattacacttaaatctggtaagttagattataatgaaacaaaccaaacgttatatttaccattttcgatgatgccaaaacctttaacgagttttgatggcacggttgctcctttttcgaaatctacttccgcaagtaatacttatttaggatttaatgatgtggcactcccaagctcacgtctttccattaccgatgatggtattactgttagtggtgtaacaaaagaagaattcgataaccttgacgaaattgaatataatgcacgctatgacttcccaactggcagctacccgacaccaccaagcatgacatcttatacaatctcaagcgggacatatgatcaatattttgatattagccacacgctagatttaacggcggatgaaagttttgactataatcaatacgatacaacatcagaagaacaatttttaaaagatgtgcatgctgaaacagatgatggcacagctgtaaagagtgattttgatcaagttgttaagcttgatgtaccaggcgaatataccgtgacattaaacgcagaaaatgctgcaggactcaaagcaactcctgtaacagttaaagtaaccgttcatgaaaaaccagtaatcacctcagactctcaaatttcttataaaaaggaaacgactaaatcagtcgacgaatttttgaaagaaatacatggctcggtaactggaaatgccgttttaacaagtgattttgataaagtagtagatttaaacaccccaggcgaatataccgtaactttaaatgcaataaatgaccgcggccaaaaagcagatcctgtaacagtagtcgtaacagtgactacaagcgacagtggacatgttgatccggttccaccaacacctcaagaagaaacagatcaaacaatcattcctgaacctcaaagtgaaaccacagaagactcggttaaagaagatcaagccaaagacggacaagcaaaatcagaagaaaaagcagataaaacttctttaacaacgaaagaaaacaaggtagaaaaatcagaaaaaaccaatcaaccaaaaacaaaagcattgccacaaactggtgatactaataagaccgccttaccgatcgcaggagtaatgctgagtttagcggcgctgctaatttttagaaaaagtaaatcttaaattattgtgaattcattagcaaaaagaatgaatagcaggcctaaaatcatttttatagggtatggaatactataagaaaagttgtaggagggtttatatgatggaaaaatatcatcgcattcttgtagcagtggatggttcagaaccagcaaaattagcctttgaaaaaggactggaattagcactaaaattagacggtgtgcttggaattgcaagtattgtagatttacgtgccttttctccaaatgtttcttatgatggcagcttagaagaaaaagccgaactagaactaaaaacaagtgttaatgaatatgcagaaaaagccagaacggcaggagtgaaacaagtagaaacttttgttgctaaaggtaatccgaaaatcttgctttctacagacattccagcagagttccaggcagatttaattatttgcggagcgactgggatgaaccgagtagaaaagctagttcttggtagtgtttcttcttatattatggctcatgcaatttgcgacactttaatagctagataaaaaaagcgtagatatctttgttagaagatatctacgctttttattatcaaaatggatcgaagtaagtgtattctgttacgccgccttcgataggtttactaatacggttcagttcatcgacaatttttttagcatcatcgccaaacactgggagaggttggtaattgttttctgtcgtactaccatctgaattttcataagtaggaacgatagaaatatcttttaggacgattttattatcttcttttgtaaatcgtagttggaacatcgacgtcatacgggaaagtagcgtaggatcagccccaaaagcaaagtcgcccatgctataaacgatgtatttatctttatatttttcaacgctttccaggcggtgagggtgagagcccataattatatcagcaccagcatctaaaatcgcatgaccaaattgggtttgataatccgttggcgtttcgcgatattccacgccccagtgcatattaacgataacgagagtatcttcttttttatatttcttaacgtcttttacaattctttctagataagctggggattgctgactcatgcggcaatcgtagccaagtagaacagttttcatccctttaatggttgtttcaagtggagcatcggcattgaaaacaggaatattattctctttaaaagcctttaatgtgtcatcgtaaccaacttggaagtaatccattgtatggttatttgccaaatttgctgcatctacaccactcgctggtaaaaaggccacgtgtgcaggatcgcttttgatgcgccacattttattttcagcttttgttgcattagtaaaagcactttcggcgttaatgatagtgtagtcatcagatttaaaccaaggaaggcagtttttataaacataggtattattgccgttgtttttttggaatacgttatcgaatttgaggtgttcgggcgtttcaggataggttccaaatgaattatcgccaaccatggtcaaagtgacaacacctttttctttcaaaccttgttgattggttgcggctgcggcataaaaccaatcatattgatttgttttttcgatggctgatagtttttgttcacttgcaagaaaagcaggatatactttcccaagcgttttttcatctgctttgccagtcgtatacgattttacagcttctaaacaggctgtgagattttggagatagacgcctgaatcatttttttcggttggataggattttagttctttaattaattgctttaaatcggaaatagaagctttgtcagctcctgaacttgctagggaattcaaggttttcttagcttctgatgaaatggttttaacattagctggacttattttttttattggctcggtttgagtggctttttggtcagattgattagtagaatttgtaatccaaaaagcaccagcgataaaaacaagtactaaaccagtaataataacataggtaagtttcttcaactagatatcctccgtagttcctttttctctaagtatagtaattgtaatgaagaaacacaagtctatatttagtaaaacaaaagcccaaaataatctattttgggcttttggtctggttatttatttagaacctttttctacatagcttaagtcatttacatcaccaatagtgaatttaccatctttgtaagtgatttttgttacacttgcatttttgataccttctgcaggcagtttgtatcctggttcgatagtatcaagaagcgcaccgatgcttagtccgtgagaaactagtaatacgttgctatcgccatttttgctttcttttttagcaacatctgttaaaccttcttttagacgagcttggatagttgcatagtcttcagcaggccagttttcgccttctttcacacgagttttatcaagagctgctacactattagcaaaatcttttggagagagaccagctttttgccattcttctaaagtttttccttggcttttcgcaatatcagtccacatattttcatttaaatcgccttcataagaaccgaaattgaattcacggaaacgtggatcagtttgtacttctttgtcagcagatttatcgctttctttcaaaattaagtttgcagtttggatagcgcgaccactgtcactgctatatgcagcagagaaatcaacgtcttttaagcctttaccagcacttttaactacttcttcaccagcgggagtaagaaccgcatcagaccaaccttgtacacggtcagttgtgtttagcattgttttaccatgacgtactacataaaatgtcacagtgccatcttctttagtttcttttgtctcttttttgtctgcagatgtactgttaccgcaacctgcaattaatagtactgcgcataacgccatcaacaatttaaaaatatttttcttcatcttgttctccttttttgttagtttttagcaaaataaaaacccagataaattgaaaactagcccaaaaagccagttctccatttatctaggttatgcccaagttggtaacattcctgaataaggatatttgtttataggacgattttagcatggatggaaagcgtttacaagtctgtttttgataaaaattggaaaaataagtaaattatttgtttgaaacgctaatttaatttccattataaaaaggctcagatttaatccaagccttttcccacaacacctaaaccaacaaaaccgcaaccaacgccaaaaccgccggcaagccctgtttcaccaaaatccccttagaagaagtcgcccctccaaacagcgccgccacaaccacacagctcaaaaagaaaatctgcacagtttcagcaaaccctgctcccgcgaaaaacaatccccacacaagtcctgccgcaagaaagccattataaagcccttgattcgcaaatagcgtctgtactttcttattcgcaagtagttccttctccacaccaaatgtcttggctgcgagtttggtattggcgaaaaacatttctaaaatcattatataaatatgctcgatcattacgatgaaggttaaaataaatgctaaaatggccataaaaaacccctcttttctacttcgaagtatagcatagcttgtaaatttttcgtaaaaatagagcttgaaacgttgacttattggcgaaatctccgtaatatcaaacgtagactacttaatttttagtctgaaaagggggaaattatatgcaacaagaagcaacaggtgggcaaaaaattcggccgataccgattattgcctcatttttgatggcggggttcattgggctattcagtgaaactgctcttaacatggcgcttagtgatttgattcaggtgtttgatattagttcagcgacggtgcagtggcttacgacaggttatttgctaacgcttggaatattagtaccaatttcgggattacttttacaatggtttacgacacgaggtttattttttacagcagtgagtttttcgattgctggtacgctcattgcggcgctttcgccaacgtttgcgatgttaatgattggacgtgtagtgcaagcagtaggtacggcgctattactaccattaatgtttaacacgattttactgattttcccagagcataaacgtggctcagcaatggggatgattgggctggtaattatgtttgcgccagcagttggtccgacgatttcaggacttattttagaaaacttgacttggaactggattttctggatttccttgccattccttattattgctttattattcggaatgaaatttatgcaaaatgtttcggttgttacgaagccgaaaattgatattttatcgattatcctttcgacgctaggttttggtggagttgtatttgcctttagtagtgcgggagaaagtggttggggaagcgcaacggtattagtttcaattatcgttggtggaattgcacttggactctttgtttggcgccaactaacaatggaaaaacctttgatggacttgaaagtatttaaatacccaatgttcacattaggacttattttagtatttatcagctttatgatgattctttcaacgatgattttactaccgctttacttgcaaaatagtttagcgctcgcagcattttcagcgggattagtattacttccgggtggggtgctgaatggtttaatgtcaccatttactgggcgtttgttcgatgcatacggtccacgcgcacttgttatcccagggtttatcgtagcggttgtggcactatttttcttaacgagaatagaagttgggacatctgcattaaccatcatcgtgctgcattcggtgttaatgattgggatttcgatggtcatgatgccggcacaaacaaacggattaaaccaattaccgccaaaattatatcctgatggcacggcgattatgaacacgttgcaacaagtttccggcgcgattggaacggctgttgcgattacgatcatgtcagctggacaaaaagcttatatggaaacggcgcaaggagtaggaccggagcaaatggttgcttcactgacagcaggaattcaaaatgcctttgtctttggactgattatggcttgtattggtcttctgtgttcgctatttattcgtaaagctaaataataaagcgaagagaacttctcgtaatgagaggttcttttttgttttgacaaatgggttctgagtggttaaaatgatagtaaatatagtttataaagtttatttaataactatacgaatggagcggttgatgatggcaattcctcgtgatttaaaagaattgaataagaaaaatatcaagtcgattttacggcaacaaggtgcgatgacgaaagcggaaatcgccgaagtaactgggcttagtgtagttacagtgaataagttgattcgagatttagtggaaaatgaagagattttagaacaagataattcggttgcgactggcggaagaagagctgtttcatatgaaattaatcctaattttcagcaggtgttggttattagtttgcaagaaaagtggaagaaaattacttattctttttcggtctataacttgcttggtgagccggagtttgtggaggatatgtctggagaggatttggacattactgcgctgaaacggaatacgaaagacattatttgcgcttttccgaagatttcttgcgttgtaatcggggtgccgggaattgagattggtggtaaactgcgggcgatggactttccgctacttttaaatgtgcaattgcgggagactttggaagcggaagtgaatttgccggtgttggttgagacggatacgaatgcggcgattttagggtataaaaatcggccgatgaaagaggagaatatcgttggactttattatccggagcgttttccaccgggtgcggggctattgatgaacggggagattttgaaaggtcagaacggactggctggggagattaagcatatgccgcttcaggtggactgggataactttgatttttcggtcgatgaaattaaagcgcatattcgtaaaatggcgctcctcacgatgagtttttatgatccggaaacgattgtgctgtatacgaatttttattttgggcagaaggattttatggaagaattgaaggaagagttgaagcaagtttatccgtatgcggttttgccggagattgtgttgtcgcgtaagtttacgacggattaccggattgggcttttggcgtttgggattgattatttggagaataatatgacggattggcggatataaaaaaagagccctttgacaggctcttttttacttatttaaagaaattcggtaaatactctttatgcgcttctaaaagttcgtccagcatttcgcgggctacagattcgcttggagttagtgggttgattgtcattgcaaggagtgctttgtcgtaatctccagtaactgctgcttcggctgttaggcgctcgaaagttttgatttcttggatgatgccgttgatagcgattggaaggcgtccgcttgctagtggaattgggccttgacgagtgataacacagtttgtttctactgcggaatcagggtcgatatcaaggatggcaccattgttacgagtattaacgatttgaatgtcgcgtttgtcgttatagatagagttgattaggttacatgcagcttcactgtagtaagcgccgccacgttgttctaattgttttggtttttcagcaagttcttcttgtttgtaaagctcgaataattcagcttctacttttttaacaacttctgcacgagtaccatgttctgcgtatgcgcgagcttggtcttccagttgttgttttgtttgccagtagtagcgtaagtagtcgattggaatcatgtttaatgtacgtaagaatgttttgtcccagccagttgcattgatgtttttaaggcttgagccagcttcatcttctgtcattttgaaaacaacatcttttgttacgtctttgccattgtggtaaacagttttcgcgaataccatgtggtttagaccaacgaattccacgtaaatttcggaaacgtctacgccaagagtttcagcgatattgcgttcgatgccgatagggccgttacataagcctacaactttcttttggttactgtaacgaagaactgcttctgttaccattcctgcagggttagcaaagttgattaaccaagcatctgggcaaaggcgttccatgtctttacaaatatctaaaataactgggattgtgcgaagtcctttgaacatgccgcctggtccgtttgtttcttgaccaactacgccatatgaattcggaatgcgctcatctttcacacgtgcgtctagtaaacctacacgtaattgtgttgttacgaaatcggcgtctttaagcgcttcttcgcggtctagtgttaaatgtacttccatgtcaacgccagctttttctaccatacgttttgctaaattaccaacgatttctaatttttcacggccagcttctacgtcaactaaccatagttcacgaactggtaattcatcttgacgtttaataaatccttcgattagttcaggtgtataacttgatccgccaccaatagttgcgattttaatacctttagtcattatttatacctccaaggatatttttttgaaaaggcttacttatttggtatcaccttttcttctcacagttatagtataggaattttatgaaaaaatagctagtatttgacgagctttaggtaaggattttctaagtaggaacttgtcacatttgagtaacgaggtgttacatggtaaaataaagcgaaaagaggtgcggaaatgctttttttggataaaaatttggaattaaatgatacggaattagatatttataattatattgtggcgaatttagataaggttgtttatatgcggattcgtgatttggcgacggaagcgcacgtgagtacgacgacaattctacgtttttgccgaaaatttggttgtaatggtttttcggagtttcgcgtaaagctgcagctttatttggaagagcagaaattggcgcagattgatatggcggatgaaacgacgtatattgattttctgaaacgcacggcacaaccggagtttaaagcgcaaattcaaaatgcggtcgaaattctccgtgaccgcgaactggttttatttgctggggtgggttcatcgggtgtaattgctgaatatggcgcgatttatttttcgtcattatttacgctggcgctacatattgaagatccgcttaaccacccgttttaccatttatcaagcaaattatccgataaaatctgcatgattgcgatttcggtggaaggggaaaatgaggatattattcgctatattcaccaattgaaggcacaaaattgtaaagtaatttcgattacaaatagtgcgaaatcaactattgcaaggctatctgatgcgaacatcgcttattatattaataaggaaatgtaccaagaagcgaatatcacgtcccaactaccggcgctatatacaattgaaaatattgcccgggaaataagaacgcaaattgataaagaaaaaatgtaaaaagctacgttttgcttggatttccgagcaaaactttttttgtaacaaaattgtcacttacgaagaattttttaatttgctacgatagttctttggaggtgaaattatgtacagtaatatgaaagagaaggtcgtttttacacttattatgtgttctttaatgattttatgcatgagctcttataatatctttcttgaaaatggtattggtacggattctttgatgattattttaaaagcatttgtcccgtttctttttattggatttttattagacttttttgttgtcggaaaaattgcgaatcgtctgcacgcccttttggttagtgaagatgcttcgaaatttaaaaagatcattatgatgcaattattaatggttacgtttatgtgtgtgcttatgtcaacgcttagcctgattgtaaaccaaggcgaatggagtcatttaggtattcttattttacgcaattattttgtggctttatttttgcaaatctttatcgtgtcaccgtttgtgcggctaattagtccgcggatttttgcgcttttgtaaaaatgaaaaacgcttagtcgagtttaggcccggctaagcgttttgctatttatgttcggcgtaataagcatcgagcgcgtcttccacggttttcttcgtgtagccattatcgataaggtagccaagatcgtgttttctaaagctggttttcaaatgatcaattaggtcagcgaagtaatattcaatgcctttgtcatcaagccatttgagcaagtctttcatagattcggttgcggttgtatcaatgttaataatcgcactcgcttcaaaaatgactagtttcgtatcatcttggacagcttcttttaagccatctgcaaatttgttaaagttcccgaagaaaagagaagcactataacgataaatgacgacatttggaattggttttgcttctgatttacgttttaagtcgaaataaccgtggcgtccttcgattactccaagaatcgcaattggtgttttcatcgaacgacttactacgttaatgaatgataggaaaattccaagtagtaccccgaaaataacgccaactaaaagagtaccaagtgctgcaacaatccaaacagttgcttcacgacgagaaactttgaataaaccttttaacacatctacatcaataatacctacaagagcagcgaatacgatacctgaaagaaccggttgtggcatatagtaaagtaagccacttaagaaggcaacgatcagagcgataatggtcgcagcaacgatagaaaccatctgcgttttaccacgaaattgttcgttagcagcagttcttgatacgctggcactcgctggagaacaaccagaaaatgcagcgacgaaattagaaaccccataagcaaataattcacgattatcatcaatcgtatatttgtttctcatagcaaaactttcacttggcaaaagcgaaccggcaaaagttgcgatggcacagactaaaccaccgccaatcgccagtgcccatgaacttgcaccaaaatctggtagtgctagcgaagggaaaccaactgggattttaccaacaatatcaacattatattgatctaatttaaagaaataagcagccattgtcccaagtactaaaacaacaagagacatagggattttgggtattacttttttacaagtgataacaataatgactgtgactacgcccatggcaaatgaaatccaattggactggaaaaattgtccgaaaataatgcctagactagagaagaaactatctccgctttcttttaggcccattatcttaggaatttgccccataatgatggagacactaagtccggaaatgaatccactaagaaccggggctgatatgtattttgcgaaacgtcctaattttaatacggagaaaagaactaaaaatatcgcacaaaagaatgcgagaattggtgcgagcgcgatagcttctttagatccggcagcaagtccagccgttcctaaaatgatggatcctgtgatggcacttgccgttgcatcaattccgaaaataagttgcggtgaactggcaaatataacataggcaataaccggtaaaaatgacgcatataatccataaatgggtggaagtcctgctacttgtgcatatcccattgcaactggaatcgtcagtgcagcaacaccaacgcctgaaatgacatcatttcgtaaataggatattttgtacccatttagtgaaagcaagatgtgtttaaacataagttcctcccttgaaatgtatttttactctttattctacatcataaatacatattaatgaaatcttatactatttacccgttttgacatagaacaatcatctctacattagttttattacaattatccaaaaaaacgccttattctaaaaaaacaatgggaaacctatcactccttctttgtgctaactctgattcatgttagactgaaacatagaaagtccaaaattaggaaaaagaaagcagggggttacaaatggcaacgcaaaagaatttagttgatttagcaacaaaagcttatatttacggttttcctttcatttttaatacacaacaaatcgagcgttatgtaacggtagggattggtggaacaaagcaagttcctttcaataattttactcatgcatctcgcttggcagaaccgtctgataaatttgtcagtgtgaacaacgatactatttattctaatgcaccaattgatgttagtgccggaccggtcgttttaagtgtacccgatacaagtggtcgttattatgtacttcagtttgttgatgcatggtcaaacaattttgcttatgttggaaaacgtgcaacggggacttcagctggcaaatttcttttaactcctccaaattggaacggtgatgttcctgctgatatgatagaaattaaatttcctactaatatagggattattattggccgacttgcttgtgacggtgaagctgatttaccaactgtaagagaattacaagaacaacttaagataactcctttaaatgaagggaaagaagtggatggttttcctgaatatgatcgctcactaggaaaagagctagctttctttgaacaattacgagtttatatggctcaatttccaccagcagaaagagatttggttaagcaagaaagttttgcgccaattggtttgatggaaaaaggggtatctccttatagtaacccgagtgaagaattaaaaaatgcccttatagagggagcaaaagcaggtttagcgaatatcaaaaaagcaacaaccaattttaaatcagaaaatggctggggattaacacaacatttatttgattataatgctgatttttttgaaataggaacgaaaaaatctttagactgggtaattgaggaccgtgaagaagcatacataattcgtgcagtttcagctattacggcattatggggaaaccatggctatgaagcggtttatttgatgacatggacagacacagacggtaatgccttaaatggaaaaaataaatatacattggagctaaatccaattccgccagttgactcattttggtcgattacgatgtatgacttgcctgaatactttttatgtgagaacccgattaatcgttactcgattggagaccgtacgccaggtatacaatataatgatgatggcggtatcactatagtggtttcgaaagatgagccaactgacccgaaagaacgtgcgaattggttgccagctcctgatgctgagttcagaccaatgttccgcttatataatccgcaacaaccactcgtggatggaagctatcattttccgggatttgaaaaaaagtaaataaaaaagccgcgatttcctattaatggaaatcgcggctttttttacttgttcttggcataaatggtcatggcttcttggaggaattgagaaaggccatcgccgaattggtcgatatttttagtgaaacgttcatcattaacgtacatttccccaagactagcaaaggcttctaaagaataaatgttgccatgcgtatcatttaaataatggaaaaaatgatcaatctcgagttgtgcttcttctgattccggggtgagtttccgaacagaagctaaatgacgaaattcagcgtcaaaactctcttttaaagttaattgttctttttcactcatattattcactttttcattggctttttctactactttatctccccaaagttttcttgcttcttcttcatatgggttcgaggaaaaatcaaatccagtgaatttttctttgtttgtcattgttatttctcctttttcattcttgatggtcagatcgagggttgctagcatagtttcaattcgctgctttttttctattagtaagtggcgctgcatatctaaagcaacgtttttatcgaaaagtgggtcatcaagaatttgttgaatttttttcaaagggaaatcgagttctttaaagaaaagaatttgttgtaatttgtcgacatctttttctgaataaatacgatagccattccagtcatctttttgcggtacaagtaggcctattttatcgtagtggtgaagcgtgcgcacacttacaccagtgagttcagctaattcttttatttgcatgaatgattcctccttctgcttttactataaagtatgacgtcgcgtgatagtcaagcttgaatttgtgtttattataacctttttagtggaaaagaaaataagttgtagtcaacttcttttaataaaatgaataaaagcatggaaaaaaagtggacattctcgtataatgaagtgtaaatgtgtcgaatttgtgacattggtatatcgagaataaaaaggggatagcatcatgataaggaaagttaaatccattagtatgtggctatggcaccatttaacaccgcaaatatttgcggttatttgtgtttttattatcactatcatagcactttttatgcctccatatattggtatggctgataatggagactttttccgaatcttctcgagtaacggtttgtttgtcaataatacgaattatgatgcgctgcaatttgggcactttgtgaaggagtttgggatttatcagtactttaatgaaaaccaagtggctatatactcctcgcaaagtatctttattcaaatggcgcttcttttaaataagcttttttggtcaactactgtgtttgatgtgcgctttttgggaggcttgcaattagcacttcttttaccagcgatttatttgttagtagcgggtttaacggcgaaaatgaaaggctggccggggtatgtggttgcggcgctaacagtatttattttcgcagatacagcttatacagcttactttaattcctttttcagtgaagggcttattttgattatgatgctgtatatttcggcgggatttttacttttatatcagcataaatataatgattatgcgatgctaggtttgatttttgtggcatcccttattttaattacggccaaacagcaaaatgcgccgattgcggttgttattgcggtttgtggaatactcgtgtttttcatccggaaaaatcgtgcatttcggatttcagccgcggctacctttttagttattttcttgagcggagtagtgatgtacgcctttattccaggcgagtttgtaacgataaatcagtaccaaacgatgacgcgcggtgtgctacttgattcagaaaatccggagaaatcactcgaagaaatgggcatgaattctgaattcgctttacttaaaggaacgaatttttatcaaaaatataaaatgattgatttagactcgaaactaatggaaaaagaattttatcctaattataattttgttacggttttgagttattatttggaaaatccaaaacaatttgggaaaatgcttgatctatccgcgcaaaatagcttttcgattcgtccgtttgaaatgggaaactttgaaaaggcgacaggatataaatttaaagagaaaacgcattttttctccgcttatagtgatgtaaaagaaaaatttgctccagcgaaatttacttttttaattttatgggcgcttgtttttctgatttgttatggagtgagtgcttttaaacatttccgagaaaagaatattcgtggaacactgctgtttgatttaatcgtcttgctgattggttcaggatttgcggtgattttagtgacgattgtgggtgacggagaagcggatttaacaaaacataatttcttgtttaatgtgtgctttgatttgacaatgttaattggagcggcttctctgctcgaagtttatttgaagaagaggggtgagcggaatgcgtaaaaaaatgattataagtattctactagcattcgtgattttcattgtcggcgggcattctgcaatagcaaaaacggatgatggtgtcgttgttttttatgatagtttagcgactggtacagagaatgaaggcaatatggatgcgctacttcgaatgttaaatagtttgggcaaacgagtgacgatttattcttgggaggaaaatcctgatttaagtcaaacaagcgaaatcatcgtacttcaaaataaaaatgacggcttagcaaatgattggacggaaaaattagccaaaagcaaagcgaaaatcgcatacataggcggaaatccaccaacatttttaacggataaattgcaactgaaaacaaaagcaattacagatgcttctatcacaattcaaacggaagctggattgtctggaaagccacagctggtgaacgaaacaaatctaattacttcctataaaggaacaagctttggtgaaatggacgctgctgaaaatggacaagctgcatacggcgttcaagcaggaaattacgcgtacgcgcctctttttcagacagataatacgagtgaattcactttaatggatgtactcaaagcattattcgatattaaaacgacaactaaccaatatgcgtttattacgggcgtaaatccattcgtggatttcgatttgctcaaaaaaacagcggacactttttatgaaaaaggaattccgtttatcgtgagtgcagggcctgttttttacaatcaagatttccaagcagcaaaaaattatgcagagattttacgctacgttcaagcgaaaaatggcacgatcatgctgaatgtgccggcagttacctacggggatagtccgtccggagaacttgaaagtattatgcaaaaatcggtaaatttctttgcggaaaatgacatcgcaccaattggagttacggccgaactttattggaactttgataaagcatatggcgtagaaggtttcgcaccatttaacactggaattttactaccaaatcaaaaaatcattcatacgacaaaagtgaataatggcagcgcatttgaaaagtctccgtatagcgtggcgaacgatttttatgcgactacaactgaagggagaaactttccggtcgatattgcgataacctattcattttttgataacgagaaagaattaaaagcggccgcagaggaactagcgaacgataatattagtgattttaggttccaaaatcatggagtaaaaacaaataaagatacgattgaatcaagtgctggttcgctttacatcaataatcaaccagtggcgcttgatggcgatttaaactatattaaaacaaaaaataaggcagtgaaacaaactggaagtttagaaggtttcttcggctaccaaaatacctttttcacgatagtaattatactttcacttggcattattggggttttatttgtttttggataccggctttacatgaagaaatatatgaaatgaggtgaaataaatggttgttgcagattatttagcattattcgcggtaatatgtatttggggacttttgctaattaatattgtgttaattgtcgcaggatatgtttattatttgaaaaatgaagcgcgaaaagtgcccgaaataccagtggaagtaccatttgtttctgtcatggtgccggcccataatgaaggaaaagtaatcgtgaaaacggtggagtccctactggcgtttgattacccggtcgatcgctacgaaatcattgtgattaacgataattcttcggataatagcgcggaacttttagctgccattcaagcaaaaaatccgacacggtttttaaaaattattaataccgataatattacaggcggaaaaggtaaatcgaacgcgctcaatatcgggtttgcggaaagtcgcggggaactggtggcgatttatgatgctgataatacaccggaacggcaagcgctaagaatccttgttggcgagattacaaatgatgcgaaacttggtgccgtcattggtaaatttagaacccgaaatcgaaatgcgagttggttaacgcgatttatcaatatcgaaacgcttagttttcagtggatggctcaggccggcagatgggccctgttcaaactatgcacgattcctggaactaattttattgtgagaaggtcgctcctagaagaaatcggtggctgggatgtgaaagctgttgcggaagataccgagattagttttcggatttacatgatggggtaccgaatcaaattccaagcgaaggctgtcacttgggaacaagagccccaaacattgccagtttggttcaaacagcgctcaagatgggcaaaaggcaatatttatgtaattttaaaaaacgttccactcctttttaaacgagaaggtaggcgcgttcgctttgatattttatactttttatcgatttactttttactattaacttccttgattgttagtgatgttttactcgtattatatgcgcttggactagtacatacaacacttgctggccttagcggggcgctttggttgctagctattttactttttgtcgcaggtacttttattacactcaccacggaaaaaggcgaaatcagtttttcgaatttgttatttattatgttgatgtatgtgacgtattgccagctttggatggtggtagccgcatatgggttctttattttcttaaaagataccgtactaaaaagggaaaccaaatggtataaaaccgagcgtttctaaaaaggagagtgcctaatgaaaaaatttactgtaatgtggctgctaattttcgccgtactatttctgtataggccagaggttttcgcagcagataaaaactatcaaacggtttttggaacagataaaaccgcccaaggaaaattcacgaccaccaaacaaaacttcacggtggaaaactactgggatgtatcaaatgctaacgtaaagcttgtgtatacaattacccaactgagtgaaaaagaagtttccacgatgacactgaaaataaacgatgttgcgttctactcttttaaaccagataaagcagacaaaggaacaaaacaaattgaaatcgaaatcccgaaagataagctaaaaaaaggggtaaatgttctatctatcgaaagttttgtctacactgatttgccagatggtcgttgtacgattgacgatacacctgccaactggctgcaattcgataaaacaagcgcaataaacgtatcttattccgataaagctttccaaaaaacgattgccgagtttggcgagcgcttcactggaattgatactgtgaaaagtgaacaaggtgcagtagctgtctcaaacaaagccggtgatgccgaacttggcgcagcacttgaaggcctttccggattttctgcagcgaatacgttagaagataaaaatatcgcttttggtcaatatgaggaagcgaaaatacgtgacggcaaaaattatctcgtacttttttcgagctatgacaatttaccaaatgatctaaaattacaaataaaagacgataataaacttgaaaaacaagcgcttttccaagtagtgacagttggaaatgcgaacacacttgtaattacttctaaatcaaatgacgcgcttaaaaaagccggcaaactaattgctaaccaaaattacttaagccagcttgggacaaatactaaatggttaacaacagacgaaagaatcgacacaccagcaactagtgtcgataaaaatacaaaactaacaacaactggtgataaactaaaaggaattgggcatatcacacaagattacttcatcagcatgccagccaaccgtagcgcatcaacaggaacagaagtatcacttgattttagatatgcgcaaaacttggatttcgagcattcattagtaacgattttagtaaacggaaaaccgattggtagccaaaaacttaccgctaaaaaagctaatggcgacaaattgacgttccaaattccgagcgatttaaacgtaaaaggggatttttcagttactgttgcctttgatttagtcttaacgaataactattgtggctttattgcagattctgaaatcccgtgggcgtatatcaccccagaatcaaaaatcaatttaaacacaagcgaagaaacagatttgctttttgaacaatatccgtacccattcattgcaaatggcgactttaacaatgcagttgtcgttgttccagatgaattaacgacagaagacacagattcattagcaaatattttcaatctgttaggccgcttccatgatggaaataggggagatttaacggccgtacatgcggccaactggaaaaaaccaaaagaagaatcaaacgttattgcagttggtacaatgaataataatccagtgattaaaaacgccaatgacgacctatatttccagtacaacaaaacaggcgattacttcctttccaatgaaaaaatctcgattgaaaaaaattatggcaaacaacttggtagtgtgcagttgattacatcagatggcgtcccaattctggcagttactggtccaggtgccaaacaaacagaactcggatcggatttaatcgcaacaaaagccaacctagctaaaatttacggagatggagccattgttgatacagataacacgatacattcctaccgattcaaaaaagaagcagatacacaggaagaaagctttggggcaaaaatcagtaataacaaagaagtcactgtgttcggagcattcgcgcttctaaccgtcgttatcttagttgtcgcggtcctactaatcttgcgtaaatatcgccggagccggaagtgaggagaaataaaaatgaagaaaataacgaataacttatttgcagatatcggctttttatttttcatcttgctttgtttcatcacaattggctttatgatcaatacgccggatgaatatttgcgaaacattattttattaaatatcacttttttacttgtgattatcacctattttacgaatttaacgcttggtttgattttaaatgtcctctacattttcatttatgcaacttatattatttatgaaattgtcgcaaatcaaatcgcctatggttttggtagctacttctggcttataatcacgcccctttttacagtagcgagtgcgatgtttacaagaaatacgtcaagacttcaagaagaaaacacgaaaatcaaacagcaaaatctatatttaggaacgattgaccaagaaactttgcttaaaaatatcgtttcattccaaaatgacgagcggattttttccagtatttcacgccgttatgatttacctttgtcactaatggtcatcaaagtacgtcattggcgcgagttgaaacgattccaaagcgaagatgagatgcgcctagcgttacaagatatttcggcgattttagagacttgtatccgtacgagtgatgtcctttacttattagataaagatgatgcgacttgggggctgttgttactaacagacgaaccgggtgggaaattagttgcggatcgaatcaaaagccgcatagccgaagccaataccgaagaatttgccgcgaagtaccgtgtgaagctagaacttcgaattggaacaagccaatttgatagcgaaaaagtgaagacaccgcttgattttatcgatttagcgacaaaagaattagaatatgacgtgtaaaatagagagttaccttctataattaggaggtaactttcatttttgattggaggaacaccatgaacttagaagaaatagtcgattgtatgttattaaacgaaaatgacaaagaaattcagcggacccaaacggagcatcgtatcaaactagttgatttttggcgagtgaaaaaaggggaccgagtgctggaggttggttgtgggcaaggcgatacgacagccgtacttgcgaatgcagttggtgctagtggctttgttcaaggtattgatattgcaccgcgaacttatggtgctccgtttaccattggcgatgcgacagaccatttgcagaaatcaaagctcggtgcgcaaattgattttaagctagggacagatattttaaaaggtgatatcacttttccagacaatgcttttgatgtagccgttttatcgcatgcttcgtggtattttagttccaaaagtgagctcacgctgatgctcgaattactaagcaagtgggcgaaacgcgtttgttacgcagaatgggatacaagaattacggatgtgaaacaaacgtcgcatatgttagcagtgctcacgcaatcatcttatgaagctttcaaacaagaaacccagtccaacattcgaacgttcattacaccaatagatatgcaagaaattattcaagagcacaactggaaaatgggcgcggaaacaagtatcttctcagaaaaaatgcaagatagtcgatgggaaattggttatgtaaaagattttatcacaaaagaattagaagcagatttaggcttaccggaaaaattcaaagcatttttactcagtcaaagtaaattaatcacacttgaaaatagtttgccaatggcgtcatactacacttcttggcaggcgaagtaattttgctttctttttcacaagatttagattttttatgctataatggaacgtattaacgaactaaaggagtgttggatgtgagagctgtacttactgtaattggaaaagataatgtgggtattgtcgcaggtgttagtaataaattagctgaactgaacatcaatattgtggacgtatctcaaacaatcatggatggctattttacgatgatgatgatgtgcgatattagccaaatcacaaaagaatttgatgaagtaaaagcagaattagccggtaaaggcgaggacctccaagtaaaaatacatattcagcgggaagaaattttcaacgcaatgcacaaactttaggatggaggcgattctagtatggaaacaaatcaaattttagaaacgatacgaatgattgaagaagaaaaattggacatccggacgattacaatggggatttctttgctagattgtatggacggcgacggcgaagcggctcgaaagaaaatctatcaaaaaattgtcaccaaagcgcgtaatttagttgcagttggtgaagcgattgaatctgagtttggcattccaattattaataaacgaatttctgtcacaccgattgcgattatcgcgggatcgagtgctgatactgactacgtagaatttgccaaaacgcttgatgccgcagcaaaagaagttggcgtgaattttattggcggctattccgcactcgttcaaaaaggttacacgaaaggcgacgaaatcctgattcgctcgattccgcaagcacttgcacaaacggaacgcgtatgctcatcggtcaatgttggctcgacgcgaactggaatcaatatggatgctgtacgtcaaatgggtgaggtaatcaaggaaactgcggacttaacagcagatacacaaggcctaggttgcgcgaaactcgttgtatttgccaatgcagtcgaggataatccttttatggccggggcattccacggtgttggtgaagcggattgcgttatcaatgttggtgtcagcggcccaggtgtggttaaacgtgctatcgaaaaagtaaaaggtgaaccatttgatatcgttgctgaaacagtcaaacaaacagcatttaaaatcactagaatgggtcaactcgttggtcaagtcgcttccgaaaaactcggcgttccttttggaattgtcgatttatcacttgcgccaactccagcgattggtgattcggttgcgcacattttagaagagatgggactagaaatggttggaacgcatggcacgacagcggcactcgcacttttaaatgatgcagtgaaaaaaggcggggtcatggcttgtggacatgtcggtggtttatcaggcgcattcattcctgtttctgaggacgcgggtatgattgaagctgtgcaacaaggagcgctcaacctcgaaaaattagaagcaatgacagcaatttgctcggttggtctggatatgattgccgtaccaggtgacacaaccgctgaaacactagcagcaatgattgctgatgaggccgcgattggcgtaataaataataaaacaactgctgtccgagtgattccggcaagcgggacaaaagttggcgacatggtcgaattcggcggattactaggaacagcaccagtaatgccagtaaacggtaaatcttccgttgacttcattgcccgcggtggtcgaattccagcaccaatccattccttcaaaaactaacaaaaaaaggtttcctcgcacattcggaggaaaccttttattatgtcgttttccgctctactaaacgaaaatctaaatcaagcagtggcaaatcactgccaaataattggttcataattaacataaacgcattttcggcttgcaaatttacaggataatgaatcgtcgtaatatcaagcaaatgcgccacttccatattatcaaaaccacaaatcgcaaaatcttccggcacactataaccaagccgcctcgcttctgtcaaaagcccagccgcaaaataatcattcggtgtcaaaaaggcatcaggtttatgctccgtttccgcaaaccaatgcgcaatcttttccccgtcttgccgagaaccttgcccataaaactgtctaaactcatgcggatcaagctcatagcgcgcacaaaaatctttaaaagcaagcatgcgactttgcgtattgagcccagtcgtattgccgtacacattcacaaatttccggtagccttttgcatacaaatgttctagaccgagcgtgtagccatcatattgattcataaatacagaaggaattttttcactttcgacgcgttgccaagtgacaatcgggccgtattttgtataatgctcaatcgttttccaatcattcgaccgaatcacgagaacgagcgcatcgatttgtttttggcgcagcatctctagggcttccagttctttatccggatcgatccgcgtcataaacaaagtgacgttataaccatgctcttgcgctatcatcgtaaaactttttaaaaatacattaagggaatctgtaaaactaggaataaccatgccgattagcttagtggcccctttttttagggatacggcatttatattcggaacataatctaacttgtcaattattgtctgaacacgttttcgcgtttcatcacttacatagtcgcgcttattaatcactcgggaaacagttgctgatgaaacacccgctagtttcgcgatttcttgtatatttgccaattgccaaacacctcggtttctcttagctctgtaattagtataccaaaaaagcccgtcaaatagccagtttagataaatttaaaataagtgcttgacctgtaatgcattacatgaattatgatgaactagaagaaaagaaaacgctttaaaattctaggaggtaagtatattatgaaaaaaggtgtaaaaatcgttacaattggtgggggttccagttacacaccagaacttgttgaaggatttattaaacgctatcatgaacttccaatcagagaactttggctagtagatattgaagctggtcgtgaaaaattagaaatcgttggcaatatggcaaaacgtatggtcaaagcagcgaacattgactgcgaagtacatttaacactcgaccgtcgtgaagctttaaaagatgctgattttgttacaacacaatttcgtgttggtttattagacgctcgtattaaagatgaaagaattccacttagccacggtatcatcggtcaagaaacaaatggagcaggtgggatgtttaaagcattccgtacgattcccgttattcttggtattgtagaagatatgcgcgaactttgcccagatgcttggttaatcaactttacaaacccagcaggtatggtaacagaagcagttcttcgttacggcaactgggataaagttatcggtctttgtaacgtgccaatcggagctgtgaaaagcgcatccgacgttttagaaaaaccagaagaagatttattcttcaaattcgcaggaatcaaccacttgcactggcatcgcgtttttgacaaagatggtactgaattaacagaaaaagttatcgatggcctttacgcaccagatgctaaccctggaaaagtcgttgaaaacattaaaaacatgcgcttcttatatgaacaagtaaaacacctaaaaatgcttccttgtccatatcaccgctactactacatgacggatgcaatgcttgaagaagaactggcatctttcaaaaacgaaggtacgcgcggagaagtcgtgaaaaaactagaagacagcttgttcgaattatataaagatccaaatctcgattacaaaccagaagaattatcgaaacgcggcggtgctcattatagtgacgcagcttgtgaaatcatcaattctatttacaacaacaaaggtacagtaatggtagtatctactcgtaataatggcgcaattgatgatgttccttacgatagcgcagtggaaatcacaagtgtcattcgtgcgcacggtgcggaaccaatcaacttcggtaaattcccaccagcacaacgcggtttactacaagtgatgaaatcgatggaagaattaactatcgaagcagcagtaacaggcgattatgcaactgcactacaagccttcacttccaacccactcgttccaagcggcgacttagcaaaaacaattttagatgaaatgctagaagcgcacaaagagttcttaccacaattcgctaaataattcgcaagtgatcccttgaaaacagggatcactttttttatgagttgttttagcgagcattttttcaagtttcctgtaaaatagaaaaaaggaggtgtgattgatgcaaacaaatcttgaaagaataaaaaaacacatcgagaaactagatactttcacagcaactccgggtcaggggacaactcggcttacatatagcaaagaagacctcgacgcgcgcaactatttaaaacaagaaatggctaaagttggtcttactgtttcagaagatgcgattgggaatatttacggacgactagaaggggaaagtccagatttaccagcagtaatcgtcggttctcattttgactctgtgccaaatggtggtgcttttgacggaccagctggcgtcattaccgggcttgaagtagccagtgttttccacgaacaacaaattaaaccacattttccgcttgaaattattgcgatggtggaagaagaaggctctcgttttggcgcaggacttcttgcctcacgagcaatcacaggcaaagtcacaacagaaatgctacacgaaatgaaagatatagatggcattacagctacggatgccatggcgaaactaggatttaacgcaaaccgagtacatagagccattcgcacaaaagagtccgtgaaagcatttatcgaactgcatatcgaacaaggccccatcctcgaaaatgccagtgaagacgtagcgctagtcgatacagtagtcggtttaacacaaatcaaagtaaccgtaaaagggcaagccggccatgcaggcacaaccccgatgcttgaccgaaaagatgcgctagtttccgctgtcgaaattttagggcaattgccagaactcgctatccaagaaggtggcggaactgtgctaacagtcggcaaactaaacgtctatccaaatggcgcaaatgttattccagataaagtcattttcaccgtggacattcgcgcaaaagacgaaattcacgttcaaaatacattagcaaaaacgaaagaaatcattcaagccaccgaaaaaaatggtattacttgcgaaataaaagatatgatttaccaacaaccaacccatttatcaaaagagattcatcaagctctaaccgaaagtgccgaccaattgggctttaagtatcgaacaatggttagcggggccgggcacgacgcgatgattttcgctagtttaaccgaagtgggcttgatttttgttcctagccacaacggcataagtcatgctccagaagaatggaccgattacgacaagctacaaaaaggaattgaagtcgtactcaagacagtaaaaaaatggacggaggaaagcgcgaatgaatcagaaaataaaacaaatagttttaaataacgaaagtgaaatgattgccttccgccgtgatttgcacatgcatcccgaactccaatggcaagaatttcgcacaaccgaccaagttgccaaagaattagacaaactggacattccttaccgtcgcacggaaccaaccggattaatcgcggaactcaaaggcgggaaatcaggaaaaacagttgccttgcgtgctgatatggacgcactcccagtccaagaactaaaccaagacctcccatataaatccacagaagacggcaaaatgcacgcctgtggtcacgatgctcatacagcgatgctaataaccgcggcaaaagcactcgtagaaataaaagacgaactacctggaacagttcgcttcatttttcaaccgtcagaagaaattgcggagggcgccaaagaaatgattgcccaaggagcgatggaagacgtggaccacgtgtttggaattcatatctggtcccaaactccaagtggaaagatatcgtgcgtagtcggctccacattcgcctcagcagatattattcaaatcgacttcaaaggccaaggtggtcacggagcaatgccgcatgatacaatcgacgctgccgtcatcgcttcctcgttcatcatgaatctccaagccatagtagctcgcgaaacagacccccttgaccccgttgtagttactattggcaaaatggatgtcggcactcgctacaatgtcatcgcagaaaatgcccgtttggaaggaacgcttcgttgcttcaacaacacaacgcgcgccaaagtcgcaaaatcaattgaacactacgccaaacaaaccgccgctatctacggtggtacggcagaaatgatatataaacaaggcacacaaccagtaatcaacgacgaaaaaagcgctctactcgtccaagaaacaatcacggaatcattcggcgaagagatgctttactttgaacgtccaaccacgggtggcgaagacttcagctattttcaagatgaagctcccggaagttttgcactcgttggctgcggcaatccagaaaaagacaccgaatgggcgcatcaccatggccgctttaatattgacgaaagtgtcatgaaaaatggcgccgagctatacgcccagtttgcctataactatttaaaccaagctgaaatataacaaaaaaagcctccagctaattcaattaactggaggctttttgcatgctattgtttttctactacatgtacatcttcgaaagaaccatattttgtccaccaaggaacggcaccttcatcaagtaatttatcaagagaagtaatattttctttcccttgagtacgaagccattcgcgtaaagcgtcatcgccttgtttaccataaacttcgataccatcagcccaagttgcacgaccgcaaagtacaccactatattgcacattatgttggttcgcgaattggattgttttatggaacatttcagaagttacaccagcacttagataaataaatggaagtgggcttaagtcagagcactcttcaaaatgacgagctgcctcgtcttgcgtataagctacttcaccttcagcaaaaccttccacatatttaaagttaactggaacttcaagtttaagtacatctacaccataacgaggtttagagaattctttaatagaagcttttacttttgctggtttcaatttagcatattctagagaaccagaatcagtaactgttgcatcataagtaattggctctaagaaaaatggaatatcaactgcgcgacattcagcaccaattctttctaaaaaggcatatttgatttcattaatttcagcaggctcatctggatcataataaacaagaattttaactgcatctccaccattttctttaatacgaagtgctgataaatcttcaattaaatcaggaagtttaccaggagtagttgcgtcatatcctgttttttcataagaagttaaaagtccgctaccttcgtggcgagctttgattgctggagtaccatattctaaatcaagcaaaattgcagaagcataaggagttagttcttcagaaacaagttgtttgaagtcctctacatcctttttattttctgttcctttagcttgttggatcatttttttgagtgagccacgttggtcaatggcaagcgctgcaatgacacctttatcgttggagagtctttgtaaaccatcaaatttaccttttgttatttgtaccatttttatctagtctcctttatagcaatttgttgttgctttaatcaatttatccttccttattataccactgaataatttttttaaaacataggtatatttccgcattgatttatctgaagtaataaattacgatgtatgtggagtgttaggtattaatagaaatttgggataatttctactaatacattctcttttgggaaagtcatttaacgataagactagaccaggagtgatgaaatgaatcgacgcgaaagacgtaaacacaaaagacgcaagaacatgattatcgtgttgagtactgtatttctaatgtttattgccactagttggatgatatacgaattcaaaagtaaacaagagcaaacagtatccgcaccaactaagaagaaagcagcaactgcgacaaacccatcggaaaatgcagcaactaatgagccagaagaaacgaaagatcctgaaccagtagaagaaaagccaaaggaaacaattgtaaaaaatcaagaaattgataactatttacaaaaaattggttttagtggttcggcacttgtagttcgcgatggagaaactatcatacaaaaagggtatatgtatgcaaatcgtgatgacaaagtattgaatacaccagatactttgttttatattggatcttctcaaaaagcaatcatagcaactgcacttttacaattagaagaaaaaggtaaaataaacacgaatgatccaatttcgaagtatatacctgattttcctaatggtaataagattttagtgaagaactttatgaatcatacatctggtattgttggacgaccaaacttaacaagtaatatgacaccggatcaaattgttaaagctattgagaagcggggaattaaatcacaacctgggaaatgggattatatggatgctaattatactgtagtgggttatcttgtagaaaaaattagtgggcaacctttagccacatatcttcaagaaaatatatttaaccctgcaggaatgaagcatacaggatactatcaaaaagatgttgatgggggaaaaaacgtatcaacaggctataaaattgatgaaaatggagtctttcaaagtccaaagcttgcagacttaacgaaattatatggtgcaggggacattagtatgtctacaacggatatgtatttgtttgacaaagcattgatggataaaaaattgatttctgaagcaagtttgaagaaaatgttcacaaaaggaagcaaatcaacttatggaatgggattctatgtggatccagggagttataatagtcacggagttgtgaccggatgggacgtgtctaatagctttagccataccggaagaacttacgttatattattctccaacgtccaaaactacattgcttcattcggaaaagtgaataatgatatttatggtttcttaaataaataataaaaaactcgattctgtttgtagaatcgagtttttttattatttaccagtaatttgttttacagcatcttccatttgataaagttgagcagcggcactgtagtcgctccatttagtattatccactttatacacttggtttttcttcacggctggaatatctttccaaacaccttttagcatttcatccacagaatccgtgttgccatcagctggcattaagatgaagagacgatctgctccagctgcatattcaggaattgcttcactagaaatagcttttgtttctttgtttgctttagcagcgtctgttggtgtgaaacccgcgccggagtataagccgtcaaagacttttgcatcgtgcacatagatttctttaccataaaattgaattactgcagctttttcgttcgcaacaccagcatctttgagtgttgcttttgcttctttggagcttgccgcgtaatctttgtcccatttttctttctctgcttttttatttaagagattagcaatgttagaaagttgtttgtccggagtatcaccaaaatgcgtgatataaacaggagccactttttccaaattctctaaaagatctttttggtaatcactaataataattaagtctggttttaaattagcgattttttcaatactaggtttgtcattaccaacactttctgtcccttttgttgcatcagggtatgtagtgatgtaataatcagttgtaccaacaggtttaacgccaagaatttccatttcgcttacgttttgaagtgcgacaattcttttcggcgttgtaggaacttctactttgcggtccgttgtatcagtgaccgtttttgttgcggattccttttctttgcttgagtccttatctgaagaactgccacaagcggttaatactactgctaaaagaacagtcatcaaaatagcagcccatttatgcttttggtacattgtgtatttcctccctaattgaaaatgattttcattatcgttacaaaagtaattatatcgaaaacagggaggattgacaaggtgaaatataacacaaaaaatttttatgtttaaaattgaatactatcgccaaccgtaattgttggaaaaacttctggagaaacaacaatagctcccggtaaaacttcattttgtcctgagcggaaataaacggaaatatgaccaagttcttcgaggtttttgtttgcgtctgtgccgacttcttctattgtatacacttgttcgccaattagtaatgtgttccctttagtaagggcgttattcggtgcatcttggaattcgtgaataaccgatatttcacgtaattcattagtagctgttggtccgaataaaataacaattttttcttcttcaaaagcggggacaagtggcccgatttccataattttacttatagtcatagcaaattcctcctaaaattaatacataccgatactgaatacccatgcgataacaacggcaaggacaccggtaatcatccggctataaagaatggctggaacgccgaactgaaccgtttttggcttagcttctgcaagagaaagtcctacggggataaagtcacaaccagcttgagcattaatcgcaaatagtgctggtagggcgtaagtaactggaattgcaccaatcgcaatttgggatccgattaaaacaccaattacttgagcgataaccgccccaggtccaagaatcggtgaaagaaaaggcaaactacaaataaacgcaattagtaacattccccaaagtgatccagcaagtggagagagtgtattcgcaattaatttcccaatcccagtgtaattaataataccgataatcatactaataaaagccataaacggaataatgtttttaatgagcatatcaacggaatcacgcccggcttgatagaaaacgcccattgccttcccgataccgcgtgaaaattttacgagaaagccttcttttaattcgcttgcttctttttggtcttctttaattttggcataatcttctttgaatttctctctgtcaaatggtttaccaggctcagcgcttatatctcgaacttcaatatcttcaggtttgacgccagaaacaaaaatatcttctgtaatatgttttgcgagtgggcctgatggagaagaagggagaacatcgactgttggaatacgtttcatcggataaactccaattcgagcagtgccaccacaatcaataacaacacacatcatttcttcttcaggaattgaatttttaaagccatccacggcttcagctccagataattcagcaattctcagtgctacgggatgaataccaccaccagtaatagaaacaacttttgttctcggttcgctcggagtgatatctagtccaactccccaaccaccttgacctttattcacatgaattgattgatacatttcatttgcctccttctatttcagactttttcttttcgcattaagaatttcgtaattgtttctgtaatcacaccacgcattaatataaccacgatgccagctaggaagtaacgaactgcaaggcttgacatactatatccagcttcaaccacaccattagcaatgcctagataaacaaataattcaccagcattcgcatacggaaataatcctgtgactggatgcaaaaacgatacaacggagtcataaaaagctggtttctgatgctctttaacaaaacgaccgaatgtataagccattggatttgttagcatcagtacggataaaacgggcattaaggtataacgcaaaatcatgttcttggctgaaaattggattgctcggttgactcgttcctccccgataaaggcgataatcgagtaagtaaaagttaaaaggacaattaaaagagggacaattcctgtcataaaactcacaaactgtttgccgccagcctcaaataggccgataaagtttgttccaaaccattcaatataattcactaggaaacactcctttttagttatttaaagcgctttcatacaactgttgactgtttttataattgctttttcttgaattgtattcttatttttactgctaagttccgttaatatttcggataattctttatgatggtagttggtgaaagtcttgaactgggcgaaaactgtctttccggttaaaatttggcattcatgaacaatatggttttcatttacaactaggatggctacagcactcgtgcgaaattttagtcgttccatttcagaataaagatgataaccgattttcccagcatatttattcgcaactttgttcatatgatgttgataatacttgacttggaaaaagccaagacatgtctgagcaatgaaaatgagggaagcaataaggacaatattcatttacttttcctccttagagggtgggaagacgaatcacttcccaccaagttgaatttatttactaaatgtttcatcctgcagttttctaagtttccaaacagtagtggattcatctaatgaaacgtcttcgtcagtaataaatgtgccagctttgatatttctgcgggctactacctcaccgctaatcaagccgattggaatatgaccattcgttgccatatcgacgtgagtttcaagtacaccgcgtacacagaaaccgccaatgccatctaatttttcacctgcagctatgtcttttttagcaactgcaaccgtttcggaaactggtgcgcccattggaacaatagcgtgatcgtggttcaacacagcttttgcaatggttagaggtgtttcaaggcttgctaagtgataaggacgataaaggatgtgatgatcgcggtcgccttttttcatgaggtagctaagttcgtgactaacgccttcattttgtcctttgacgataacgaatacgccaggtgccaaaccgtctacatattctacaacgccaaatttgtttaaaataccaccttggtcttttaagtctaggtctttgatgacagaatcaacatcaccagaaataccatgcattccaacaacgtctggtacatagccaatagcattagaaagtaagttcatttctgccattgttttagttccgtcttggaaagctgctagcatgtgagacgccatgtttttcccgtcggcttccacttggcaactatcagggttagcgctgattttaagtttattattttttcctttaccagcgacaaggacttccatacccattgatttggaaaattcgtaaagttcagttattgcagcgggttcgtcgccatcggagccagtatatacgaggccagcgctgtcatataattttttcattaacggtccgatagtaatatcaatttctacattaagtaaaacgagttgttttttagcaagtaaagtttctaaggaaatttttgcgccgacttctggaacaccagtagcatcgacaatcacttctacaagatcagaatgaataatttctttaaagtcattagataatagaattttttctttttttgtagcggtggcattgtaagcatctgcggctttttgtgctgcttctacatgaatatcgctaataccaacgacactcatacctggaatagcggcgatttgcgaaatcataccgaatcccatttgaccagcgccgataacaccaacgcgaatcggattattttcgttctcacgagcaagtaactgtctatataaagtcatttcaagttcctcctagtaatcgttttcatttattaaaacaaaactccggataaagctattttatcctaataaatgaattttgtaacatttgtcaccattagtgacaaatgtcgtatttcacaaattaaatataacactttaacattttttcgtcaatgaaatattagctttttttatttttcgagaaataaaaaaagctcattcctttgcgggagagagcttttgggggttttgtattttatagtaaggattattttttagtcgtttttttgaagaatgtattcggccattctatcagtaatcacaatcacatctatcaatccggcattaagagctgccactaatgcttcttttttttgtaatccgtttgcaagtgcgacgacggttgggatgttcttcaactcctctagactaagaccgatgacatgggtgttaatctcagtttttgcttcttttccgtctgctgtgaaaaagcgtgaattaatatcaccgacaacatctttatagcgtagttcttcaatatcttcagaattaatatagccgatttcttccattgtgctgtgattataagggctcgatacaccgacaatagccatatcaaccgtttttccttcttctaatacttcgctaatatatttgtttttggataaatcggttttcatttccgtatcttcaacgagcgcaggcgcatataaatatttggagtggcatttcatttttttctttaaatcataacaaatttggttggagtgcagatcaatatcactcgatcccattccacctataagcggaataattgttaagtctttatgcgggatgaatgggaattcattagcaaatttgcgaattgttttcccccatgaaatcccgagagtttttactttagcaatccttttactcagtgtgtaggcagcttctttagcaaggaaattcagtgcttcttcctcagacatatcgtgcgttgcaacgacaatcgcttcctctagaccaaacttttcttctaatttttgttctaaatctaccgtgtagtaagtttcgtctttaatgaagatttccacaatacctaagtcttttgcacgttgtaaagttttagaaataatggatctagatatcccgatttttttggctatttgtgcttgggtccagccgtagtgatagtaccatgtagcgattttcaccatatctcttttttcttcccatttcattctacttacctccatttacatcataatggaacaaaagttatatgctgtcacaaatgttttatgctaatagtatcatacaatttgctttatgaaaagttagggtagataggagcatcgtttttgccggaaaaggagtaattttgaaatggctagtgtgcatactatttatttgtgacaaaaaaacaaacaaatttttttcttatttacgaggaattcaccaaacttttttagaattattctagaagaaatattattattccatctctatggagaaaatctgccaagccgcacatggtaacataagttgagttctcgcccaacttatatatcgcttactaaattattttagaaaaggagtgggctatagtggaaaagttatttacatataaagagtttgttgacatgatgcaaaaatatgggattagacacacgaaacgcaagctaagacgtggcgaaaatttaatggagaacgcttctaaatttagtaatgttgttttactaataaatggttatataagcagttatacatatgaatctccagaaaaactcttatctatatttgaaccaggtatttttctacgttattccattttagaagatcagccagagtttgtgacaaatattgctctctcagataactgtgaagtatacgaatataaaaaagaagatattgaatatgcattaacattatttcccgaaaattttggttttcaatatttctttctaaagagaatcgggcggcatttatattatcgagcattacttaacggcaaagagcataaagaaaaactatattatgccatgaaatatttgggagaactcattggtaaaacggatgaaaacggaaatgtttcgttgccaccagaagtgacattgaaagtcttaattgaatacagtactttatccaaagcagctttttatagacaacgaattcgcttattggagcaagaaattttaaaaccgcatgaaaatacttttattgttcaaaaaaaagtagcaagtcattatgaaaaccagctaactagcatttaaaaggagacataaaaataatgaaatttaattggaaagtagttctgctgtttgttttaattttagcatttattgttccggtttattcgaaggctgtagaaacaggaaaagaagtacctaagagtccggaactactagatgataagtcatctacgttaaaaaatgtaaatacacctaaaaatttgaaggctagcccgctaacaattccagcaaatagcacgatagcagatttgtttcccgatgaagggatggcaaaaactatcgcaaaccaactaggacgaacagaaaataacaattttcaaacacctactaaaacggattggaaagtggatgatgttgttactgaggtagagttaaatagaatgtggtacttaacttcagttgctactataggaagtatcgaaggcattcaatatctacctaatctttacgatgtacggttacagtttgataaacaatgtaaggatttatctccttttttaaaggcaccaaatggatactcgcagttatatcggttaaatattaataatggtaatatttcagatatttcacctcttactgaactgagtgcaccaacgcttaacgatatagacttaggaggtaataacatttctgatttatccctttttccaaagctgcctaataaattccctaatttagaagaaatatctttggaaagaaataatatatcagatgtttcgccacttgctaaatttgccagtactaaaataaagatatttaatttggatgagaatcatattactgatttatctagtcttacaaataacaaaatgcctaatttacagcgattatatgttcgatatcaaacattagatatggaaccggtagttacttctagtaagtatgaattttctatacagccatctattttcggaacaaccaagccagttaaaataactgctactaaacccaaagcaactattgatcctattacttctaaaattacatattcagcagaagaaatggctaaaaaaccgttttattacactcctttgtttccaggagttacctattcgtgggacgagaattttccgttaaatggtagcaatagcctagtggacttcaggggtacgattactcaaccattaacttatattgaaccaccccaagttgtgtcttacaattcaggccttacttatgagataggtacatcacttacggaacaacaatttctaaacgatgtcaatttgataacagatcaaccaacaacaattacaagcgattttgatgtgaaactaaagaatctaaacactgtaggtatttactgggttgctgtcaaagcttctaatattgaaggaaatgcggaggccaatattatggtaacgattaagtataagccaccagtcataactgcagatgcagaatacacctatttagtaggagataaagtaaatgctactcaatttcgagcagatgtaaatgcaactttgacaggtgaaggaacactaagagatgactttatatataaagtaagacttaatacggcgggagattatgttgtaactcttacttcgcctaaaagtggatactatgagcaagatgcaatacctgttacagtcattgttcacgtaaaagaacttttggaattgcaaatcccagatgaatttcgaatggatatagacgcaaatgcagattctgtgccaatttcagataagaaacaaacgcttaaatgttatggttcgtctggaaaggctgagttagaggtgatagatagacgaactgtgcggcaaggatggacgataaccggagcgatgacaccctttaccaatagcggcggcgatgtgctacaaacttcgctaaaatatcaaagtaaagcaccttccagcagtccgatttacttaaatacaacgaatcaaccaattgaaaagaaacaatcagctgtgactgacccgaaatatgattccactgttttcaatctggaagacagtttatccatggaaattgagccaaatgatgcgctagtgaacgattcctatgagtcgaaaatcacgtggacactggaggatgcgcctcgaccataattgtctattttgaacaaaaggagctatctaaattgaaaaaaatgggattcattttgatttgttgtttatttgtgtgcgcgtcgccattttatgtgaaagcaaatacggataaagcgacaagtaaagcgggagtgattttcacgcatgacccccgaaaaccaaaaactggaacagatgacagaagcggcacttttccaaccaaagttcctcccaaaagactgccgaaaacaggagatacagctgatttttatcttgttttactaggggttggtttcattttaatcgcgaaaaaaggctattttaaggaggtgagggaagaaattcggtgaaactgcacgataaaaaaaggatatcagaaagaggagaataataatgacaagtagaacagtaaaggtaacaacagcgagtttattagcattaggattgattgtggcaccagtactttctggagattttgcttcagctgccacttccgtaacgaaagattccaaagggattgtaaaatttgataaaagcaccacgccagatccggatccagtaaatccagatccagttgatccagacccagttattccggatccaactgatcctcctttaggtacagacggactttggattttagccgtatctgattgggattttggtacgcataacgtttctagcttatcttctggtgcgttaaatgtgcatgcagcggatgatacgatttctacttatgtagacgcaaatggtaatggacaacaagatttgccaggggaagtttctgtaactaagaaagtaactccttatgcgcaaattagtgatgttcgtggtactaatacaggttggacactttccgtgacgggtagtgctttcaaagattcttctacaccagcaaaaacgattccgggtgcagagctaactattcccaaatcgactgttagttcagcgacttctaccgctcaagcgccaactggatatgatagcgtaacaatttcaatgactggcggcgcagcagttcctgtaatggcggctaaagatatgcaaacagctacaccgaccaactttaacgatgaccaggggatgggcacatggacagatagctttggttcccaagcagtgtccgcaacagatacttccaaaccaaaattatccattccgaaaaacgtcgttgtcgctgatggaacttatcaaagtacattaacttggactttaagcgatacaccagcagtttaacatttttaagagaaaacttcatttttggatgttgttttctctttttacattgagcaattaggaggaaagagacacttgaaaaaaatatgcgctatcatctttgcttgtatactagctattctttgttttccaggacagcaggcgtacgcaacagaaaatagtagtttttccgtaaaagcaattctccctgacaatcaggcatctagtgtgacctatttcgatttgcaaatgaaccccaagcagaaacaaacattaaaagtggaaattactaaccatagtaaagaagaaatcaccgttaattgcgttgccaatacagctgttaccaatgagatgggctacgtggattactccataccaaacacgaaaccagataaaacgttaaaatacccctttgcagatatagtgaaggaaagtgtctctgaggttacacttaagccaaacgaaaccaaaatttggacagcggctattcaaatgcccgctgaaaactatgacggcattatattaggaggattacattttcaagaaaagaaagaagaggataaagaaaaagagtccagcgaaaacgatgtccaaattaaaaatgaatacgcctacgtcattggtgtcaaattaaccgaaaaaacgaccgtcgtaaagccagaattagaattaaatcaaattaaaccagcgaccagaaattaccgaaatgtagtcgaaatgaatttgcaaaatacaaaagcgaccttagttggtggactggccgtggatgcaaaaatatataagaaaggcagcgaaaaagttttacatgaatcaaaacgcacagacttatcaatggcgccaaattccaattttaattatagtgtagattgggaaaatcaagagttaaaaccaggtaaatataaagtgcatttagttgctaagaacaaagaagataaatgggagtggacaaaagaattcactatctcttctgatcaagcaaaaaaagccaataaagcagctcttggactggagaaagactacacgtggatgtatatcgtaggtggagtattgcttttcattcttcttattatcacaacttactttgtcggcaaacgagcagcaaagaaaaaacaggaaaatgaaaaatagcctaacgaaaaaacagcttgaaaatgagaaattacctcgttttcaagctgtttcaattatttttcgattttttcagtttctacgacacgaagtcctttgcgttctaagtgagaaacaatttcatttttcttctcttccgttacgccaactggtaaggaaacaagtacgcggcgaatgaaatcttccgtttgattgtctaaagtgattaaacttgagatgctcgaataacggtcgataattttagtgattttagttaaggccccttgaacttcgccagtcgcaatcgtaagaacatagctagtcgttttcacattccagccatcttggagcaaaccaagtaattttccgtgtgttaaaattccataaaagttaccttgctcatttaaaaccgcaatatatggaagctctttgattgtaaaaaagacttcaaagaaagatgcattgacgcaaatatgcttcgttgcatttttaattaagctcattactgggtcactaagactaccaccgttagctgcgtgtttgtaaatatgcattttataaatattacctaagaatttttcacctttttcgtctaatacaggaacacagcgataaccagattcttcaagtaaatggatagcctcttgtaaagttgcatctccagggacggttgttaaatttattttagggatacaaaggttttttatcaacatgttcttcactccattcttcttccctttcattttaacgtaaagtaggacttttgtatagaaaatcactgttatcaggtacgataattcggaaaaaatgcgattatttacttatataaatggaaacttttggcataaggtttaaattttctaaaaaaagtgtattattaactatgctatgtaaatttataaacagaaagaaggacgttaacatgcaaaaagaaatgttgaactttgattattataaccctacgcatattatttttggtaaaaaccgttttaatgaattaaatgaagtgattccgcaagataaaaaagtattgattttgtatggtggtggaagtgtagaacgttttggaaccttagataaagtaaaagcagctcttaaatcacgcgaagtaggcgaatttggtggtattgaagcgaaccctacatacgaaacattaattaaagctatccaattagtcaaagaagaaaactatgactttttacttgcagtcggtggcgggtcagtaattgacggaacaaaattcgttgcagcgggagcattattcgacggtgaaccgatggatattttcggtagtggaattggcgaaaaacgtccgattacaaaggcacttccttttggaacagtactaacacttcctgcaactggttctgaaatgaatagtggtggtgtaatcacttttgtggagaagaaagcgaaacttggctttggtagtgcttatacttatcccgttttctctttacttgacccagaacttacatacacacttccaaaacgtcaacttgcaaatggtattatggacgcatatgtgcacgtaatggaacaatatatgacttatccagtaggtgctttgctgcaagatcgttatgctgaaagcctgctacaaactttaattgaaattggtccagatgttatcaaagaagataatcatgattataatacacgtgctacttttatgtggtcagctacaaatgcactcaatggaaccttatccagaggcgttccgcaagactgggcaagccacagtttaggtcacgaaatcacagcgctttatggaattgaccatgcacgtacgttagcaattgttctcccgtctcttttaaatgttcgtcgcagtgaaaagcatgataaattagtgcaatatgcggaacgagtgtggggaattacgagtggtagcgatgaagaaaaaatagatgcagcgatcctcaaaacacgagagttctttgaaagcttaggagcaggaactagatttagtgattatgggcttggcgaagaagtggtagacttactcgttgatcaattagaccgacatggtttaacgaatatttcagaacgcggtgaccaaacattagaagtatctcgtcaaatttatacaaatgctttataatggataacgaaacttttgcgcaaatctttagagaagaaatttgcttacttaaataaaaatcaatagaaaatgaaagagggcgaaatttcttgagtaccaataaggaaaagacgtttttcgggcatccgcgtggccttgctacattatttaataccgaattttgggagcgattctcctattacggaatgcgcgcattattactttattatatgtacaccgcagtagcagacggtggacttggatttagccaatcaacggcaacagcaattatgtctatttatggttcattagtatttatgtcaggagtcattggtggctggtttgctgatcgtgtcttgggggcgcgaaagaccattttttacggtggagtccttattatggtggggcatattgtactagctttaccaaatggaggagcagcggcactatttggttcgatggcatttattattctcggaactggactacttaaaccgaatgtctctaatgttgttggggatttatatccagcgggtgataatcggcgtgatgctggctttagtatcttctatatggggattaacttaggtgcatttattgctccaccaatcgtttcggctgtttctgataacgctggaagttaccatgctggttttggtgtggcggcggttggtatggcaatcgcactcgttgtttatgttcttacaggaaaacgttacttaaaagacgctggcaaaaaagcgccgaatccgcttcaaaggtcagaagcaaaaagtcttacattcaaaataattggcattgttttgggcataggattattaattgctgttttaacgctaattacaggtagcttaacaattgatacgattatccttgctgtaacggtgatgggcgttggggttccactcgcttactttattatgatgatgactagcaagaaaaccgaggcggacgaaaaatcacgattaactgcatacataccgttatttttaatcgctgtactattttggatgattgaagaacaaggctcgtccacattggcgcttttcgcggcagaaagaacggatttatctatttggggtatgaacttaaatccggccaatttccagtcgcttaatccagtgtttgttattacactttcgccaatttttgcatggatttggacgaaacttggtgatagacaaccatctacaccacgtaaatttgcccttggactattcttcgctggtttatctttcgttgttatgatgcttccaggtattttacacggaaacacgacaacacttgtaagcccgctttggttagtactaagtttcttcatctgtatttttggggaaatgtttatctcaccagttggtttatccgcgactacgaaactagcaccaaaagctttcgcatctcaaacgatgagcttatggttcttgtcagatgcaatgggacaatcatttaacgcacaattaacacaattatttaatgctgacacagaaattgcttatttcggaattactggttttgtagcaattgcttttgcaatcgcattattcattttcgcgccattcttgaaaaaatatatgaagggcgttcattaaaggaattaagcgcactttctccttatttggaggaagtgtttttttgtgctaggaataaattagtttgccattaactcctaagattgctactattaaagggagaagtgataatttaaaggagtgtatacatggaatcatcaagcagggtagttatttatttaacgcgacatggaaagacgattttaaacacacttgatcgggtacaaggctgggctgactcgccgttaaccgaagaaggagcacttgttgcgcatgatttaggtcgtggtttaaaagggactaattttgtagccgcttacgcaagtgaccgaggacgtgccatcgaaactgcacgaattgtaatgaaagaaagcgataaccatcatttaaaattggagaaattagctgaaatgcgtgaatttggtttcggaaaatttgaaggggaatataatcaagccgttttaaaaatggttgcaaaggcgcatggttttgaatctattgaaagctattatgataaaacttctgaaaataattccaatattgtcattgatactgtgcacaaaatggacgagactggaatgacggaaaactcagctatttttgaagaaagactaactgctggactcgatactattcttgccgatgctaataagcgtggtggtggagatgtgttagtagtagcgcacggtatggttattcatcgcattattgaaatgattgatcctagtaaaaatttacgaattatcgaaaatgccagcgtgacaaaagttatttttgaagatggagcatattcgattgaagaacctggaaatatgctttatgtagaagctggaaaaaaggcgcaagggggagtttaagtggcaacaggaaaactgaatgtgtacttagttaggcacggcaaaacgatgttcaatacatctcgtcgtgtgcaaggatggtcagatacaccattaacaaatgaagggatcgaagtggcagaatttttaggtcgtggtcttcgtgaaattccatttgatgctgtttatacgagtgatcgtggaagaacaattgaaacagctggtatcgttttacgcgaaagcaaccaggcgcatctggaaattaatgagctgcgcgatttccgtgaatttggtttcggtaagttcgaaggggaatacgaagatattatgtttggaagagtaatggaacaccttggtttccggtcgatggaagaagcttttgaaaaatttggcgatgatggttatcaaattatctcagaaactgtggaaaagattgatgaaactggtatgtctgaaaattgggatgagatggttgctagattaaaaaacgctttaggtacagttagtgcagaaaatgaggtggaaaatgccaacgttttagttgtttctcacggaatggctatcaatacgattatttctttttttgataagtcattaattaatccagacttagccaatgcaagtgttacaagacttggttttgaaaatggcgaatggacaattgaaatggtgaatgatttaagttacattgaagcaggtaaattagttttagtataaaaaatccagaatggcactgaggccattctggattttttaaattattttacgaatttaatacaaactggttcaggaacttttacgtctttttgaagtaatgtaagtgcaccagtttctttgttaacaccaaaaacagtaacgttattgctgttttcgtttgttgcaactaagatttcgccagtgtagttcaggtcgaagtcacgtggacccacgccttctacaggtgttgttgctgcatgtgttagtgtaccgttttcggcaactgcataactaacgattgcatcttggccacgatttgaaacatataggaaacgaccatcaggagaaatatggatagcgctacctttattttctttgtcaaaaccttctggaagagaagcgattgtttgaataacttttaacgcaccagtagcttcatcgtattcagcaaaaataacttcggaagttaattctgtcatgatatacacatatttagcatttggatggaaaacaaggttacgaggaccgcttcctggttttacgtctagctcggttactttttcaagtttgccagcgttagcggaataagtcgttactttgtccgttccaaggtcacatgtgataacgtatttttgttctggagtaaagccagcaaagtgcgcatgtggtttttcttggcgttcgtgaacacttttaccagtatgttgaatggttgaaacagagggctttaaagcgccgttttctgttgggtagcttacgattgtgcctaagtggtagttagcagaaacaacgatagaaccatcatgagacgcatctacataacatggcgggttacctgtttgaacatcttgaccgatgaaagtaagagaaccgtcttcttcaacagaaaaagctgcaactccacctttatcgccatcttttgctacagagtaaacgaatttttcgtcatctgaaattttaagatatgttggattgtccatttttccagctaatttattttctttgatttcgccggtagttttgtcgattactaagcgatagataccttggctctcggctttggtatatgtaccgatataagcagttgcttgattttttgacatgccaattcctcctatatataagatatttcctagttaattatagcatagtaaagaaaagatagaaaaatatcacgattattgcattaatgttacattttattattaaaacagcatttttgatttttatgaaatatttttgtaataaaagtattgactaagacataaaagtaatgtaagatatacttatcccatagagattgtcatttgaaataagctaattgaaaataaattacttcccccatagaaatattcttaattgcttatttcaaataaacactcctttaagatagttgtagcacagaatttcccagattctgtgctataattatgtagaaatagagatgctctgaaaatgaggctctctttttttatgacctcaaggaaagtaggatgaataaaatgtccattcaaacaatttttggaaatggccaatataattggattaatatcgatacggataatacagataaactagcagatttttacgaagaatatcatattgacgatgaagtaatcgcgtattcgattgatagaaatgaacgtgctcactttgaatacgaccaaaagaccaatacttttgtcattgtgtttaatgtgccagatcaaaggaaaattgataaccattatgagacaattccaatggtttttataataaaagataagcaattaataacaataacaaacaatgacaatcaatatattacacgaaaaatgaagcgttatttaaaagaatcagatgaagttactatttttcaatttttattcagtagtttgtattttattatggatgctttttttccatatgtggaagaaatggatacggatagaaggacgattaatgacaaattgaaaattaaaacgacgaagaaaaatttattgtcattatcagatttggagactggtattgtttattttgtttccgcatctaagcaaaatgcggcgttacttgaacaaatgaaggctcatatgatttaccgagagctaaatgaagtggaaaaagaacaatttgaagatgctttaattgaagcgagacagcttgtggaaatgacggggctgagttctcaaatcttacagcaattgtcaggtacatataataatattttgaacaataatttgaatgatacgatgaaaattttaacggcgctatccattttattgacggttcctactattattacgggcttctttggaatgaatatgccacttccgctagaacataatacttttggttggattgtgacgatttttattagtgtgattctatggttcggactttcttttattttacgaaaattaatgagataacaaaaaagcccttctttcggatagaaagaagggctttttaaattaaataataccttgagaaatcattgtatctgctactttgaggaatccggcgatatttgcgccgataacaaggttaccaggtgcgccatactcgcttgcagcattgcttgaatttttataaatatctttcatgatgttttgtaaatgttcgtcgactgtttggaaagtccagctcatacgtgtgctgttttgtgccatttcaagtgctgatacggcaacaccaccagcattggcagcttttgcaggaccgaatagaactttattttcgtggtaaatatccactgcatcaagggtagaaggcatgtttgcgccttctgcaacagcgataacaccattttttacaagcgctcgggcttgatcagcattgatttcattttgagttgcacatggtagtgcgatatcacatggaacggaccatacgtcgccgcctgcgtaatattctgcagatggatgaatggttgtgtattcgctaatgcgtttgcgttctacttcttttaattgtttcacggtctctactttgataccttctttgtcataaacaaaaccagcagagtcgctacatgcaactactttagcacctaattcgtgtgctttttcgatagcataaatggcaacgttacctgaaccagaaacgacgatttttttgccgcgaatggtttcaccagctgcttctaacatttcaacggtgaaataaacaagaccgtaacctgttgcttctgtacgagctaaacttccgccgtaagaaaggcctttacctgtaattgtaccggcatcataagcgccgcgaagacgtttgtattgaccgaataagtagccgatttcacgaccgccaactccgatatcaccagcaggaacatctgtatctgggccgatatgtttttgtagttcagtcataaaactttggcagaaacgcattacttctgagtctgattttccttttggatcaaagtcagagccacctttaccgccaccgattggtaagccagttagggagtttttgaagatttgttcaaaaccgaggaatttgacgatgcttcctgttacagaagggtggaaacgaagaccacctttatatggaccaattgcgctattgaattggacccggtaaccgcgatttacgtgtactgtgccagaatcatccacccatggaactcggaaactgataaggcgttcgggttctgttaactgttctaaaatgccatttgcttcgtatttaggttcttttgcaagggctgggataacagagtttaagaattcttcaactgcttggtggaattccgtttcgccaggattccgttgtttaattgtttcaaacactcgagctgcgtattcttcggctgcctttgtgtcgttttggatagtggatgtttgtgccatactataatcgctccttgtttaaatattttgactataaggaaaagtagaaaacctgacgcaaatacatgcaatgttataaagaagaaaaacattggcttgtgtgcgttaagtaggtcaacttttcttacctatgttgttagtttacacattgttgagaatattttcaagcataaaaaccaatttttctgaaattttttaaaatgtagttaatgagaacgtttgcttaggttttaatgagtagatatagaagatgtaacaaaaaaataaccgcaccagggggatgcggttaagggagtattagggagaaataatattaaagcgagccaagggataagactaattcggatactggaattattgctctaacattatttgctttctcttgggaaaaatgaaagctctccacataaacaagtatataaaaaatgaatttaaaaatcatgcgctttttcttacaaaaatgatctctaaggttacgaaaatgtcatgtttttataaatcgttaatttctttacggtcgcgagtggtgctcaattttccttctcgtttttggagctccgtttggatggcaactaatggaatatttttttcggctaagagaacgagcaaatgataggccaaatcggaaacttcggcaattaactcttgattatcatttttagcggcaataacgacttcggttgcttcttcaccaacctttttgagaattttatcaaggcctttatcgaacagatagttggtataggagccttctcttggttgagttttacgcagtttaatttcttcatataggtcatttaacatttaaaaatcctcctttatgagattgaaaaagcaactttttttgccggtgtggcaggctggaccgatttgggttacacggataagtaatgtgtcgttatcgcaatcggtccagatttgttttactttttgagtatgtccgcttgtcgcgcccttattccaaagttcgtttctggagcgcgaaaaaaaccaagtatagccagtttcaagggttttttggtagctttcttcgttcatataagcaagcattaaaacgtcgccattttgatcgtctaggataatagttgggacaagccccttagaaaaatcaacagaaatcatggacggatattcactcctttttcgagtaaggttgttttgacatttttgatgcttagttcgccgtagtgaaaaatgcttgcagcgagcgcggcggttgcctttgttttttcaaaaacttcaaccatatgtgcggcattaccacagccgcccgaagcaatgactgggacggaaactgcttctgaaattgcttttgtgagcgggatatcgtagccgtttttggtaccatcaccgtccatgcttgttagtagaatttcaccagcaccgagttggactgcttttttggcccattcaatagcatcaagtccggtatcatttcgaccgcctctggtgaagacgctccagtttgtgccattccatttggcatcaattgcgacaacgatacattggtttccgaattttgctgctccttcttggatgagttctggccgtttgatggcggcggaattgagcgaaatcttgtcggcaccagcttgaaggagttctttcatgtcagaaacactactgatacctccaccaactgtgagtggaataaaaacttgctcggcagttcgttccacaacatctatcatagtttgacggagttcgacagttgctgtgatatcaagaaaaacgagctcatcggcaccagcttcattataagctttagcaatttcgacggggtcaccgacatctgttaaggaaacaaaattaacacctttgacaactcgacctgctgtgacatcaagacatgggatgattcgtttagtaagcaatttgttccacctctacaatatctgacatagaaatatgatgattataaagggcttttccggcaattgctccgtataagccgagttgggcgagtgcttccaaatctgcgcgactgctcactccaccagatgcaattaaattaactttaacgtgttctttaagattagccatttgttctaaattaggtccagttagcgtaccatcacggctaatatcagtgtaaatgattgtctcaacacccactttttccattcgtttagccaaatctaaatagcttacctgactgacatcgagccaacctcttgttgcgacaaaaccgtttttggcatcgatacctgctgcgattttagctccatatttttgaactgccgcacgtaggaaatctggatctgttagagcggcagaaccgataatcactcggtcgatgccggactcgaggtaataatccacttgcgccatgctacgaattcctccaccaacttgtacgggtattttggctgttattttcattttttggatgacttctaggttgatggggcgtccttctaatgcgccgtcaaggtcaacgatatgcaggtaagtcgcgccatctgttgcaaatgcttttgcttgggcaatcgggtcttcattgacaactgtttttttagaaaagtcgccttggaaaagacggacacattgtccattttttaaatctattgctgggaagatttgcatgaataagtgacctccttaaatccttttaaaatttcaagaccgatttggccgcttttttcaggatggaactgggcgccgtaaatattgcctttatttatcatgccaggaacttcaatagaatagccacttgttgcgataatgtattcttctgggcaattggcgtaataggagtgaacgtaataaacgtattctccatcaagttgttttgtaagcggggtggcacgtttgatttgtagttgattccagcccatatgtggaacggcaaattcgggatcttctggtaatttttcgacatgaccgggaatgagaccgagaccattagtaaagctatgttcgttacttgattcgagtaaaagttgcataccaagacaaacaccaagaattggtttgccaccggcagcgatttcttttaatgttttatttagcccgcgccgagtgagttctttcatagcttcaggataagcgccaactcctggtaaaataacgccgtcagcctgtgagatttctgttgcatcactagaaattttgttttgtagtccgataaaatcaagtgctttgctgatgctcttcgtgtttcctgtatcatagtcaataattacaatcatttacaggacccctttagttgaatttacgcctttaatttctgggttaatcgtgattgcttcacgaagcgcacggccgaatgctttgaaaagtgcttcgattttatggtgtgtgtttttgccataaaggacgcgaaggtggaggttcatttcggtattaaaggcgactgcttggaaaaattcttccactaattctgtgtcaaaatcgcccagtttagggtttgtgagttcagcgtcaaaaacaagataagaacgtccacttaagtctagagcacaaaaaccaagtgattcgtccattggaacataagcagagccgtagcgattaatgctcgctttatcagcaagtgcttcttttaaacaaagtccgagtgtgatgccgatgtcttctacggtgtgatgcgcatcgacataggtatcaccatctgcttttacatttaaagttactcggctatgcttggcgaaaagggtaagcatgtgatccaaaaatccgactccagtagaaatagttgattctacttgggaatctagattaatggagagctctatagaagtttcagcagtaacacgggttttagtagctgttctcatttagttttcctcctcgaaacgaatttgaatggctttggcatgggcatctaggccttcttttttagcaagtaaaacaatagcatctttttcttttgcgagtgcttcttttgtgtaagaaataaaggcagaacgtttcgtgaaatcttccacgccgagaggagagaagaatttcgcggtaccacttgtaggtaagacgtgatttggtccggcaaaatagtcgccaagaggttccgatgcatagcttcctaagaaaatcgaaccggcatttttaatttgattgaggtaattcattggattttcaagttgtacttctaagtgttcaggagcgatttcgttcataatatcaaacatttcttgcgtatttgctgcgataatgattttcccttgtgtttcgatggatttctgagcaatcgcttttcgaggtaaattttctagctgtttattaatttcgttctgagtttcctcggcgatttttttactagtagtgattaagatagcacgagctaaaatatcatgctctgcttgggagagtaagtcggaagcaatgaaagcgggattggcattttcatctgcgagcacgacgatttcggatggaccagctatcatgtcgatatcaactaagccaaacacttcacgtttggcagtggcgacatagatatttccaggaccgacgattttatctactttagggatggattctgttccgtgagcaagagctgcgattccatgcgcaccaccaacttggtaaatttcgtccacaccagctagttgagccgcggctaaaacgtgaggattaataccgttttcggcaggaggggtgatcattacgattcgctttactccagcaattttggcaggcaacacattcattaataccgatgatggataggctgccgtgccaccgggaacgtatatgccgacggtttctagtggacgaattaattgaccgcgaatgacgccatctttttcgctatcaagaaaagcatgttgtttttgcttgctgtggaaactttcgatatttgcttttgcttgttggagtgcgactagaaaggcagggtcgactttggaacttgcactttggatatcagcggtctggacgcgtagttcggtgagccgtacgccgtcaaactgggatgtgaagtcaaacagggcttggtcgccatctttttttactttttcgataatcgattttacttcggattcgacttggagtgaattattggtattgttttctgctttgacttcgtttaatagctcgtttattgttccggttaaaattttcattcagcgagctcctcctttatcgcttgttctaattggtcgattaaatggaaaatttgcgttttattttgttttaaggatgctttgttaacaattagacgggcggagattggatacattttttcataaataattaagccattttcttttaaagtggagccagtttcgacgatatctatgatggcatcagcaagatcaagcactggtgcaatttcgacggatccttcgattttgataatttctacatcttcgcctttttcacggaaaaatttggaggcgactgttggatacttggtagcaatgatttttcgtcgataactgctcgggtcaaaatcaggtgtagaagcgagacaaaactggcatttaccgatttcaaggtcgagcatttcgtaatgagatttggatgcttccattaaaacatctttaccaacgattccaatatccgcaaccccatgtttcacataagtcatgacatcaactgcttttactaaaataaaagaaatcggttgagtgctactatgaaagattagtttgcgttttttatctgtcatagaagaacagtcaatcccagctttttccaaaagggctactgcgtctttttcgaggcgtcctttcgttagcgcaatttttagagctttcataagtctgcctccctttgaaaaatagtttggatgccttgcctcgagacatggataacggctggaatatgccatttttttgcgaaagagatagcgtttgtcggagtttcaaaaaaacttaattcgctatttggtgtttcttgcatgagtttttctgcttgttggattgcgtctaggtcgtagtgaattaaaaggcttgtagaaacttgctttttgatgacgccagcgcggttttgtagggttgtgagggagtcaagattaagagccaaaccaactgctggggaggaagcgctggtgaattgttctaggaggtgatcgtaacggccgccgcttaaaaaattatcagcagcaaggtcagcatatcctctaaaaattatacctgtataataatgaaaatcttgcacgagtcctaaatcgacactaatatctgctgtgtaagaaacagcttccacaatggtttccatttcacgcagtgccgttaaaatgcctttgtccgttgttaaatttttggcttgttttaaaatcgctgtcgctggtccaaataatcgtggtagtgctaaaatgaaatcgtcaagcgtactcggattatcggctacaaatcgcttaataccagttaaacttttattctgaatcagcaagcgaaaatcaatttcagctgtttcggagagatttaaaaggttggttacgcgtctataaattgctgcatgtccgagttcaatttgaaaattcggaatttctagagcatttaaaactccaatcccaatcaaaatgcattcaatctctgctttaatcgaagggtagccaatgatttcaataccggcttgcgtttgttcgttttgttcgccaccaaaatcttcatttgcgcgaaaaatttttccgctataagaaagttttagagggagcatcacaccagtggtactaacaactcgaccaatcggaagtgtcatatccggcctaagaaccgtcaagcgacctttttcgtcaaagaaacgatacaacttcgcatcggcttgatgttcagaggaaaagacatcttcaaactcgataacaggcgtttcaatccgcttaaatccgcgtttttcaaaataatgattcacttgttgctcaattttgtatgcagctcgtgcttcacgaaaaagtttatcacgtgttccagttggtaagttcttatttaagttcatctggttagctcctttacgatattttaatttattagcatattagcacgttaaagcgtttttgtaaataatgaatagaaaaatagttgcttatggtataattagtgtaccatttaaagcacttgggaaaaagaattttgaaagagggttgaatatgaaaagagacgggcacacgcatacagaattctgtccacatggtacgcatgatgatgtggaggagatgattttaaaagcgattgaactggattttgatgagtattctatagttgaacacgcgccgctttcgagagaatttatgaataatactgctggggacaaggaagcggtgacgacagcgagtatggcgatgagtgatctaccttattattttaagaaaatgaatcatataaagaaaaaatatgcgagcgatttattaatacatattgggtttgaagtggattatttaattggttatgaggatttcacgcgagattttttggatgagtatgggccgcaaacggacgatggtgttttatcgctacattttttagaggggcaaggtggtttccgttcgattgatttttcggcggaggattataatgaaggaattgtgcaattttatggtgggtttgaacaggcgcaactcacttatttggaaggtgtgaaacagtcgattgaagcggacttaggactctttaaaccgcggagaattgggcatatttcattgtgtcagaagtttcagcaattctttggagcagatacaagtaatttttcaggggaagtaatggaggaatttcaggctattcttgctttagtaaagaagcgtgactatgagcttgattttaatacggcgggactgtttaagtcactttgcggtgaaacctacccacctaaagaaatcgtgacgttagctagagagttaaagattccattagtctatgggtctgactcgcacggcgttcaagatatagggcgtggatataacacttattgccaaaaatgatctttcattttgacgtggccattttctttaaactttacaccttctgataaaaggagttcgcgttgttcttcccaacccggaacaagccgacctgctgcatttacaacacgatggcaaggcgtaatctggtcacgcttcgaatgtttcagtgtagcgcctacgagtctggcgtttttaggaaagccaatcatataagcgatttggccataagtcgttactttaccgcgcggaatttggcgcacgaccgtataaacacgttcttcaaaatctgctggaaccattacgtacctccgtttgttcataataaatttagtatacaggaaatagttattttataaaagttaggatgattagtaaatgccagatttttcttacgcaaaaattacgaaactcgtggtccattttgctggaaataaagcgagagaggaaggaacagaagtatcagcgaatgtgctcgctgatattggttcagaaatgaatcaaacactagcttcgattttcttagagccatttaaaaaagatgaatattatcaatttacacatgaaacagatttggattttaatgaagttcgtacttttgctgcgaatatgtttgtcgcggaggaagaatttttggatgaatccaagaagattttagagcatttatacagcgaaacaacccacccgaatattaaaagtggcgatgtttggattttctttattgagggttgcgttgtagatggtgattttacgaacggcatcgggatttttaaagtcgaaaacaaagaagtctttcttaaaaatgattttaacggcagagaatttcaaattggctatgataaagggattaccgggacagatttagataaaggttgcttgattttcaatgtggatcatgacacggggaataaagtgttgattttagaccggcttaaccgtggcgattctgtttattggaaagataagtttttgagcattgataaaataaccgatgaaaaattttacacggaaggttttgtggaagtttgtacggattatattaaacaacgcgaggagtcgctgcttgataaatctaatttcgtaaaagcgacaacggaatatttagcaggcgaagagacgttgaatattgctgaatttgctcgcacgacaattgaaaaaccggaagaaattaccgaatttaacacgatggtggatacgttcgaacgagaaaataatgtccggtttccagaaacatttcaattagatgaagaaaagcgcgaaaaactatcgaaaaaaatacgtaaaacgattaagcttggcaaaaatatttcggttgtcgtgaaggacttagaacaattagaagaaactgattttgtccaaggatatgacgaggaaaaaggcaaaaactacatgattgtgtattatgattaaacgaaaaaaccgaggatgcggaatccccggtttttgctgtctaaacgacgaacataaagtacagtataaacagtaccatcatcacgtacataatcggatgcacttctttgtagcgtcctttaagtaccatggtaattggataaaaaatgaaaccaatcgcaataccagtagcaatagaaaaagtaagtaccatcattaaaataacgaaaaaggacggaacagctacttcaaatttagtccaatcaatatgagcgacattaccaatcattaaaattccaacgatgacaagcgcaggcgtcgtaactgcactggtaattacaccaagaagtggcgaaaagaataacgacagcgagaaacagattgcgataacaacggcagttaaacctgtccgaccaccaaccgcaaccccagcagtagattctacataagaagtagttgttgaagtcccaaaaatagcaccaaaaacggttgcaagtgaatccgagaatagtgaacgacctgcacgcggaattttgttgtcttttacaaatccagcttgagtcgcaactgcaacgagcgttccggcagtatcaaagaaatctataaagaaaaatgtcaaaataacaattagcatttgcggtgtgaaaatatctggcaagtgaataattgcttgaccaaatgttgattccatacttggtacagatgaaacaacttgagtcggtacatcaatcagtccaaacaacattccagcaacagcggttgttgccattccaaagaaaatcgcacctttccaaccaattgtcatgtaagcaacagtaacaacaatcccgaaaacagccagtaacacaggaccagaatgtaagtctccaagcgctacaatagtagattcatttggcacaataattccagcatttttaagccctaaaaaggcgataaaaaaaccaattcctgctcccactgcgaattttagttccgttgggattgcattaacgattttttcacgaagtccagaaatggtcaaacaaatgaacactaagccagaaacgagaacaccagccagcgccgtttgccaaggaattccccactgcgcacaaacggtataagcgaaaaacgcatttagtcccatacctggcgcaagtccaatcgggtaattagcgattagccccattgcaagtgatcctacaacagaagctagaatcgttgccacaaaaacagcttttaattccatcccagttgttgcaagcatggatggattgacgaaaagtacataagccatcgacaagaaagtcgtaagccccgcgagtatttctgtccgaacagtcgtcttgttctcgcgtagtttgaaaaatttatccattaaaaaaagcctccctatttatgttgtcgcacataacggaaagagcctaggtaaaaaagggaataataaataaaaatagcaaaaaaatccctattaaattttacaatagctcgtagcctggcattttacggttgcctggtagaaacgaacggtccatattaccgaacttatacgactatattattgtagcggattagccgatttttggcaatacgtgtaagaaataaaaattaaaaacgaacttttaaataaataagtttatacttttaaataaataaggtataataaaaacaaataatagttggaggtaaaaaaatgacttataaatttccagagaatttttggtggggaagtgcggcatccggcccacaaacagaaggcgcagcagatgtagacggcagaaaaccaagtatttgggatcactggtataaaatcgaaccaggtcgtttctttaacgatgtgggacctacaaacacatctaatttttactatcaatataaagaagatattgctttaatgaaacaaacagggcataattctttccgtacatcgattcagtggtcacgtcttattccagatggtattggtgaagtgaacccgaaagcagttgatttttacaatcgggttattgatgaaatgcttgcaaatgacgtggaaccatttatgaatttatatcattttgatatgccaatgtcgatgcaagaaaaaggtggctttgaaagccgtgaagtagtggacgcatatgctacatttgcgaaaacttgttttgaattatttggtgatcgtgtgaaacattggtttacttttaatgaaccaattgttcctgttgaagcgggctatttatacgatatgcactatccaaatgtggttgattttaaacgtgcgactcaagttgcttaccatactactttggcacatgcgcttgctgttaaagaattccacgcacttgaaattccagaaggccaaatcggaatcattttaaacttaacaccgtcgtatccaagaagccaaaatccagctgatttaaaagcggctcatattgcggatctaattttcaaccgaagtttccttgatccggttacaaaaggggaattcccgactgatcttgtagaaattatccgcgaacatgacgcgcttccagaatatacggaagaggatttagcgataattaaaaacaacattattgatattcttggtgtgaactactaccaaccgcgtcgtgtgaaagcgaaagaatacgcggctcacccggatgcgccgtttatgccagaacacctttttgataattatgaaatgccttaccgtaaaatgaatccgtatcgtggctgggaaatttttgaaagagcgatttatgatattgcgattaatctgcgcgacaactacgataatatcccgttctttatttccgaaaatggtatgggtgtggaaggcgaaagtcgttatcgtaacgcagacggaatgattgaagatacgtaccgaattgacttcattaagagtcatttgaaatggcttcataaagcaattgaagaaggcgctaactgccatggttaccacctttggacgttcatggattgctggagctgggcgaatgcttacaaaaaccgttatggcttagtggaagttgatttggacaatgacttcaaacgtaccgtgaaagcatctgggcattggtacaaagaacttgcagaaaacaatggttttgaagactaaatgtgataaaataaaagtattatgtgtaaagaggtgaacttccgtggctcagaaccagacaaaatatagctttattgctgaagaaatccgcaaaagaattatgaatcacgcctatccgctaaatcaacctattcctgatgagataactttggcgaaagagtttgattgtagtcgaatgacaatgaaaaaagcgcttgaagtacttgtacttgaaggcttactataccggaaacgtggacatggtactttcattatcaaatcggcgctggacgcggaccgcttgcagattcataaccaagaggtaaacggcttcactaaacttttgaatggtaagaaagttattagtaaagtaatcgagtttaaagtcatttttccaaccgaagaaattgcagagcgccttcatatcgaaatggaaacgccaatctatgatattcttcgtgttcggctagtgaaagatgaaccatatgtattagaacacacgtatatgccggttggggttatcccaggcatcaatcagcaaattttggaaggatcgatttattcgtatattcaagatgatttgaacctaaaaatcgctagttcgtacaaacaaattcgcgcggataaagcgacgctgcttgatcagcaatatctcgactgcgcttctgatgacccagttgttgaagtagaacaaaccgtgtatttaaacaatggtctcgcgtttgaattttccagatcgcgccaccgttatgataaattcgtttttactaccgtgaatatcgctagacgataaaataaaaagaagctagaaaaagtgagaaatcattttatctagcttcttttttgaatatctaagcattttaggttcaattctatacaaaagaatggaattgttcacaaaatagacatatttacacgcttgataataatttaggattcttatataatatttaacccaattacgcacaaattttaaatatagttctaccatttaagctatacggaactgtggaaagaaataatattactcctagtataagattatttaaatagttaaaagaaatcatttttgttcacgaaatagacatatttcaactcattgataatgttttttgcctaatatataattgttgagctcaattaagtgctagtttagaactccttttgataggggcgtgagcagttaaaatgagaaattagttatatgaggagggatagtactatgaagaaaaaatactttctttgcgtattcgcagtaatattatttttcacaggttttctttttggaaattcaccggtgaatgctgctgaaactgatacaagcaatgtgacgtataattacattgatatcagcacattaacagaaacgcaaaaaaatagtattatcaaaggaaatccaaacgagacacttacaaatgattatgaaaattattcctttgtgtatcaaaaaaacacatcagaaccaactacaaatacagataatacttctgacaataataaaaatcaaaatgggacactattaaaagcgggagatgttggcccaaatagttatttaatcatcctagggtttattttaatcggaagtggtattggacttcttacattgaaaaaaagatacgccagacagctgctagtatttcttgttgtccttggcggtagtagtttgttagtcggatcgattgtccaagcaacagaaaatagtaacttaaaaacccaagaatctcaaacagttgcaaaaggaacgaaagaaacgaaacaacccgaatcaatggaagggtatacgtatgtaggatatatacacacaagtaagaataatacacctcccgtagttgaaaaagggactgtaactgtaaactatcaagatgaacaaggaaattcactggcaactagtgaaacactcaaaggcgacattggccaaccatatcagactgcaacgaaaaatattgagggataccaattaaaagaagtgaacggaaatacaacaggaacttttacagagaaagcgcaagttgttacttatgtttatcaaaaagtgcctgtagctaccgtaactgttaaatacctcgatcaggatggaaacaaaatccatgatccacaaacaattagcggtaatattggcgaaccatatgatgcttcaacagataaatacaaattacaaattgatggatacacattagatacaacgaaactgccaaacaatgcaaatggtattttcactaatcaagctatagaagtaacgtatatatatacgaaagaagcgcaagatgttaaaataacaattaaatttgttgatagcaatggggatccatttgttttaacggatttaacaacttataaaaacggcgatttagtacctatttatcctaatttagatcaatatcatatgagattaaattacaatcaacaaatttataatcaaggtgaagcagtgcctgatattgttattccagctaaagaaggggaaacatatttgttaccggaaagaatgacctttaatatactggatgatcaagggaaacaaatcccctacgttatttcgcaaaatgccgatttcagtagtactgggattgagagatgggaaaactaccaaagtataccaactaatcgcgaaggaacactgactagcgaagatgtggtggttacgtatcagatacttgtttatggagttttgattcctgagccataagtaaatcaaattattcgataataaaaaagcaatctctagacgagattgcttttttaaatacgttctttccgtccacgaaatgccctaatactatgattgaatacttccgagagcattaatcccgctgctatagcgccagcaaccactgtaacttgaacagaaaagccaatcgcttccgtataatcacctaacacaaaattacgcacggcttggtaagcgaggcccccgggaactagtggcacaattcctggaacattgaatatcgtaatcggcatttttttatgtttcgcaaaaaagtgactcagaattgcgacgacgaaagcgccggcgagggaagacgcccctgttccagaatccatttgcatcaaagtccaataagccatccagccaaatgttcctgtaataccgcaagcattcagcgctctttttggcacatttgtaataatcgcaaacgtcaccgtcgcaacgtaactcagcactaattgaataatgatagtccaaactaaatccattatagcgcctcctttataagaaaaagcggaaaacaaccgcgattccaattcctattgcgcaagaagtaagtagcgcttccgttccgcgtgccattccactaagcaaatgcccagcaatcaaatcccgaaccgcattcgtaatcggcaccccgggaacaagcggcatcacgccaccgataatcatcgtgtccagattaataccccaaccaatcgaaatcgtcaaaacagctaagagcccgacacttaatgaagctaaaaattctgctagaaacttcaccttcataaaaatctgcgtgtagtaaaaaataataaaaccaatagcgccaatgatacaagttggaataaaatcaaaccaacccccaccaaaaataaccatcaacgagccactaactagtgaggccgcaataatttgcaaccaaatagggaagtagcgaacatctttatctaaattaacgagttttgtatgtaattcttttaaggaaattctcttttcagcgaaatccctggaaaattcattgaccatagatactttttctaaattaatggttcttgtcggaatttgctgtaattgcacattacgttctccttcaagcgacataaaaagcccagttggcgtcacgaaactaattccttttttattactagcgacggttgcaatgcggttcattgtatcttccacgcgatacatttcagcgccactttccatcattatttttcctgccattaagcatgtttctagcaaataatctgttgtttcattcgacataactaagcacctccaaccctttattccttctcaatcgtaacgcaatcaaatcaaaaattctagtggaaagggtgcattttttgaatttgcgattgtttcgatgtgatttggggtaaatatttgatagtatggtagatatagaatcagaaaggataaggattattttggcgaatattgaatatgaaatcatagaagaaatcggcgtattatctgaaaacgcgcgtggttggcgaaaggaattaaataaagtcagctggaacggccgtccacctaaatatgatatccgcgactggtcagaagatcatgagaaaatgggaaaagggattacactaactgatgaagaagcagaagtactaaaaaaactgttagattaagggctggtgtaaagaatgagaatgtttgcttatgatatttacgaaccaattggtagaaaagatgaagatacttttccagtgatttttgctctccatggttttgggggggacgagctagaaatggcaggacgactagaattattaatggaccgatttgtcgttgtttccatgcgtggagacgtagaatatggtcctgcttacggtttttatcatatggtgacagaaggcgaccccaacccgagagaggtagattatataagcttacgtgtcgcacaatttattgataaaatttgtactgattacatttcaattgataaagaacaagtttttcttgcaggatttgatcaaggcgcagttctagcgatatccattatgcaaagctatggcggtcaatataaagcagcagccttgttaagcggacgtttgccgtattatatggaagaaagacccgctaacttaatgttgaaagacaaacgtatttttatcggtcacggtatagaagatgctgtcattcaaatttctgaagcagatgacatcgcccgacttttcgagaaaatgggttgtcaggtggagaagcatcgttattttatcggtcacaatgtaaacgaagcggaagaagatgacttatatagatggtttgaaagctttttgccaaaccaaccagtgaaaaataaataaaaaacagcgaccacgcttggtcgctgttttttaaatatccaaagtaagaaagagcacttttaaataattcccctcaggaaagtttttattaactgtgaaatctgtgggtaaggaatgggtttccacaattttataagtacgatcgcttgtttggaaggcttccgcaattaattttttaaatgctttcataccgaatcctgcatagtttgttgaagcaatgatagtgccgtttggagcagtgatgtcaatgatttcacgaagcatagctgggtaatctttcgccgctcggaaagttactttttttgtgcgtgcaaagcttgggggatcgacaacaactaaatcaaaagttaattgtttgcgcgctgcatatttgaaataatggaaaacatcttctacgataattgcttgttcgtttggatcaagaccatttacttctaattgttcttttgtcttgctgagcgaacgaccagccacatctacgcttgtcgttttactcgcgccaccaaataaagccgctaccgagaatgcccctgtatacgaaaatgtatttaagacatttttggaaacagaataatcctcactaattcttctccgcacatcccgctgatctagaaagatgcctgtcatccaaccatcatctaagtaagttgcataattaatgccattttctttaataataagtgggaaagttgctttttgaccggcgacgaaatcgtcttttgtatcttcttgaaaacgtcttttttcataaataccttttatttctggaaaagataagaaaatatcaataatcattttttggaaagcgtagatgcctagactgtaccattgaattacgagataaccatcataaaaatcaacagtgaaaccaccaagtccatctccttcgccattaaaaatccgaaaagccgtagtagagtcatctgcaaatagaaattgacgtttttcgattgctgtcgtaattaggttcgttaaaaagtcttcatcgagttgctgtttcttgtcccaagtgaaaagccagccgctgcctttgttttgttctccgtggtagcctcttgcaataaattggccattcgtatctgttaattctaatacgtcgccttcttgtaattcttttggccatttttccatacgttctttaagaataaggggataaccttccttatagccttttgtgaacttagggaaaacttttacttttactagattcttcatcatacaccgtctttcattaagataaaatttccaacaaaaaacctgtgaagcgaactgcttgctccacaggttactttaagttattaattatacgcgaccgaagccaactagatatttaccccagccagagccgtggatgttatcgtatttaacgccattgtcttgcgcgttaatcatttgaccattaccaacgtagataccaacgtgagaaattccgctaccatagtcaaagaatactaaatcaccaggttttgcttgagattcagagattcttgtagtgctagcgtattgtgcgccagaagtacgtggaagggagattcccgctttagcaaatacatatttagtgtaaccagagcaatcaaatgtagttggtccgttaccaccccatgaataagcttttccaaggtgtttttgagcttcagcaataatagcacttgcacttgaattgctgttattgttggaagaaccttgattagcattcgtatttgagtttgtattcgtattagtatttgagtttgtattagtatttttagatggtgtatttgtattagtattgtttgtatttgtatttgtatttgtatttgtatttgttttattagcatttgtgtttgtagatggtgcaggagctggttttgcagcttctgttggtgctttaggtgctgtttgttgttgcgttgctgtttcttttttctctgtagtagcagtatttgtgttagtattttctttaactactggagctgcttgtttttcagctgctggagcttccgttttcacttctgcttttggagtagctgtgttagcagtttgtttaatagcaagcttttgacctacataaatagaagaagaagataaattattccatgacataatgtcttgaacagaaacaccgtattttacggataaagcccaaatagtgtcaccgcttttaacagcgtgtgtagtagcattttgatctactactggagtttctttcgtttctgctactttaggcgcaggtgtagttgcttgtgtagtttgttttacttcagtttttgtttctgcagcaggtgcagcttgttgagtagtagtttcttttttcacttcttgtgttggtgcaactggagtgcttactgctttgtcagttaagtatttaccgttaacgaaaccagtttttccatcgttgtaagtaattttgtgccagccgttagattcggttgtttcaacagttacttttgttccacctttgatggacgtaataatactgttatcaacaccagcgccactacggacgtttaaccaagttgcgctaacagatttctctgttttttcagcagcagcaacctcattatttacttgtaatttttgacctggtacgattttatctgttgttaaattgtttgcttttttaattgcgtcaacagtagtccctttactttgtgcgataccccaaagagtatcaccagcttcgactactacagtgcttgcggatgcgattgttggcgcagcaaatgctgttaccgcaatcccagctgtagccgcgatagttgcttttttcatattcataaaactcctctcttttttcagaaaatcccagtacgtaattaagtatttgagaattaattttatattgattaatactaagtttacccagttttcacctaaaaaacaaatgatgagataataactccaaaggctaaagaggactataccaactatttgtaataattctgtaacagttgaaaagcgaacgtgtattcttagggcttgagatgtactgctgggtaaacctttatagtgtaagtgggatgtgaacgttaatcaacaactttcgctatgggaaacctattgttttttgttaatagaaaaacttaatacatttgtaatataaaaaccggcagtttttccgttcttcgtgactcgaaatgaattgccagatgagtttatggtattctataatagaaggtatggaggatgttatataatgagacagaattatgatgatcgaaaaatagtgaaacagtatcgagaaatagcccgccaaattgttaaaaaagagggcttatataaaaatatggaacaggctgaactttgtgaacaaaccaatttttggcgcgagaagttcaagacaaaaccgatgactgatcgagataaaattaatatttttgctttggcgagagaagcagctagccgaattattggtttggatgcggttgtagtgcaattaattggagcgctcgttctcggcgatggcaaagtggcagaaatgaaaaccggcgaaggtaaaacattgatgtcgttatttgttatgtttatagaagtaatgcgtggtaatcgtgtacaccttgtgactgccaatgagtatttagctagacgtgatcgggaagaaattggacaagtgctggaatatcttggtgtttccgttgcgttaaatgaatctggtttagacatagcccaaaaaaaggccatttatacagcagatgttatttatggaacggcttctgaatttggttttgattacttacgcgacaatatggtacgccaaaaagaagataaagtacaaagtggacttgattttgttttaatagatgaagcagattcaattttaatagatgaagcgagaactcccctacttatttctgaccgtaaagaagaagatttgtccctttatcatacagcgaataagcttgtgaagaagatgatgaaagatgattatgagatggaagaacataaacgctttgtttggttgaatgatgcaggaattgagaaagcccagaagttttggggtgtcgaatcactttattccgcagaggcgcagtcagaacttagaattacgatgcttttaatgcgagctcatttcttgatgcataaagataaagattatgtggtgcttgatgatgaagtattaattatcgatccacatactggtcgtgcgcttccaggccggcgctttaatgatggactccatcaggcaatcgaagcaaaagagggtgttgaagtaaaagaagaatcacgtacgctagcaacaattacaattcaaaattacttccggatgtataagaaaatttctggaatgacaggaacagctaaaactgaggaagaagaattccgtcaaatttacaacatggatgtcgtggtaatccctaccaatttacgtgtaaatcgggaagatatgcaagatgacattttttatacgaaaaaggaaaaagggcgcgcgattgtatatgaagtatcgtggcgctatgaaaaaggacagccaactttaatcggaacttcttctattaaaagtaatgaatggattagtggcttacttgatgctgctggaattccccaccaagtattaaatgcgaaaaaccatgcccaagaagcggaaataattgccaaagctgggaaacgcggaatggtaactttagcaacgaacatggctggtcggggaacggatatcaaactggatccagatgtgcataagctcggcggactagctgtaattggaacggagcgacatgagagtcgtcggatagatttacagctaatgggacgttctggacgacgcggtgaccctggtttcagtaaatttatgatttccttggaagatgatttgttagagcaatttgaaagtaaaagctgggagaaactttccgcgaaacttaaacgcaaagcgccacgtgatgggaaaccagttaattcaaggaaaattcacgctgtcgttgttgatgcacaaaaacgtctagaaggagcaaactacgatattcgtaaagacttgctttcctacgatgaagtaatcgatttacaacgcaaaatggtatataaagaacgcgatttattattagaaagaaataaacttggagtatcttccgaaaaaattctacgtgaagttgccgaatattcatttatccatccaagtgatattccggaagaagagttagaaatttattattcacgtcaaaaagaattgcttggcggcacgaaattccctatttcttttgaccaagtaacgctaatggaaccgagagaagttgtggaagaaatcgtatcttggcataaaaaagaacgcaataaattcccggctgagacgattgctgcaatagaacgagaagtgtatttgaatttaatggaccaaatgtgggtcatgcatctggacgcgatggtacaattacgagaaggtatccacttgcgagcatatggacaacaagatccattagtcatgtaccaaaaagaaggggcccaattatttgagaaattccaagcagactatcatttctacttcgctcacgccttacttgaacttgatccagacggcttaatccaaggctaaaatacaacttgcgtctgattttttccaaatttatgggtaatttagtgagaacgagggtattaatctatataatagtatcaaacaaaaataaatttagacaaaagagggtggtaaagtgaaggggtcattcacaaagtttaaacaattttttattgaaaacaaatttgtactagggttactaatttttcttttagtagcacttgatatttatgtattaactaagattgcctttatttttgatccactaatggtaattcttaaaaccgttgctgcaccaatcattttagccgggatatcttactatttatttaatcctatcattgattggttagagaaacataagtggaagcgaggttgggcgattgcattactatacttagtgattatcggtttactcattttactatttagttttgtaattccagctgtgaaagatcagattgttagcttgttcaaatcattcccggggtattgggaccaaatcacacagaaatttgacgagttcagtcgctcgagcttatttgaccaattaaaagataaattaaatacaaacatgagcgatatcatgaagactctctccacaaaaggtacgtctgtaattaacagtgctatttcaagtattggtagtattgttgggacggtaacagaggttgttttagcgatagtaacaacgccgcttgttttattctacttattaaaagatggaaaaaaattaccagacttcctactaaaaatgttaccagtaaatggtcgtgcgcatactcgccaagtgcttggtgaagcaaaccaccaaattagttcatatattcgtggacaaattatcgttagcttatgtattggtattctgttatttatcggttatttaattatcggtttaccgtatgcattaacgcttgctattatcgcagcatgtactagtattgttccttatttgggaccagcaattgcgattacaccagcgattattatcgcgattgttacttcaccttggttattaattaaattgattattgtatggtgtgttgttcaattacttgaaggtaaatttatttctcctcaagtaatgggtaaaacgttaaaagtacatccaatcacgattttattcgttattttggtagccggaaatctattcggtgtactaggcgttattttcgcagtaccaggttatgcggtacttaaagtcatcgtaacgcatgtatttatctggttcaaacgaatctccggactttacggggaacaacctgaaagtgaatatgtagaaacaccaacggaagaaaaagaattataaaataaaaaacactattagttagaaaatatttttctgctaatagtgtttttttgtcgtgttaaaattaatgttcacaaaaaagacataatttttctctttacaaggtgagagtagtaatagcgcgatttttatgtaatatatattacgaaaacgaataaataatatgattttattctcttttttaataaattgtacattgaattgacgcatttttcatcataatatgaagccaatgtacaaggaaaggggaaacaaaaaatgattttcaaaaaaacattaattgtaggattaattggcataagttcagtcacacttttcgcaccatctgcttttgcggtaacttctgagggggattcaaaagcaactgttaaatttaaagcggggacaggcgtagttgacccggttgatccggaaaatcctacgaaaccaattgacccgctagatccaagtaatccaactgatccaggaactggaaatactggttcattaacattggattatgtgtcctcagttaattttggggaacatgaagtatcatccacggaacaaagttactcctccacatcaagaaaacctttcatccaaatttctgaccgtcgtggaactggagctggttggaaagtgacagcaaccgcaacggctttccaaaatgaagacggcgcagcttccctatcaggagcgacactatcatttaaaaacggagaaacagcatctgctagcaccacagcaacgacgccaacggctgctcaaacagttgaattaccaacagatggaacttcaatcgtgagtgttgtttcagcaaaagaatcggaaggtatgggaacatggattaatcgttggtttggcgctacaccaaatgatacagctagcttaaatgacaacgtgaaattaacgatcccagcaggaagcgcaacacttggagaccatgaagcaactattacatggacattatctgacgcgccaggagtttaaaaaatttgcgtttagaattctcttctagacgcaaactttttattaagacgatggaaggaaggtttaattgaagaaaagttttcttagtttattgttcattattccgttattagtcacatgtggcaattttacagaagcacaggcggcagaaggagatgttggctattctgttcaagctcatattcctgccaatcaaattgataaaagacaaacttattttgatttaaaaatgcagccgaaacaaaaacaaacagtagaaatcgatgtattgaatagttcaaatgaagaaattcaagtggaagcagcaatcaactacgcatccaccaatcgaactggtgttattgattacacaaaaaatgaccttacgaaaaaagataaaagtttaaaatatccacttccagaattagctgaaataccagacgaccaaaaacgcctaacgataccagtaaatggtaaaaagaccgtccaagtgatgattgaaatgccagctgaaaaagtggatggtgttgttttgggcgcagtagagttcaaaaagaaaaatactaacgagacgaaaaaaacaaaaggtgtctccttaaaaaatgaatattcctatattgtcggtatgcaattatctgaaaccgacaaacaagtcaaaccacatatgaatttactaagtattaaaccggcactcataaactatcacacagcgatagttgccaaattacagaacgaccaaccagtcattcttgaaaacttaagtattgatgcaaaagcctatcaacaaaattcgaacaagttactttaccaaacaaagaaaacagatatgaaaatggcgccaaattctaattttgattttgggattgactgggaaaatcaacctttaaaagaaggcaaatacagattgaaaatgactgcaacgaatggcgtggaaacctggacttgggacgaagcattcaccattggtaaggaaggacaaaatttaaataaagaagcagtcaacctagagaaaacaaacacatggctttacgttgcaatagcggcgggcgttgttctgattgcgctaataattattcttgtaatcagaaaacgaagaaacaaacaagaaaaataaagaaaggagctggcgaagtggctttcaaaaaattaatacttgtattgaccatggcggctctttttcttggtttaaaaatagtggtagcggcagaaaatgagcctactgatttagcgtcaaatgaagcaatcgtgactaattttgcagatttgaaaacagctatctccgaggataatgggattgatacggtttatttaggggcagacgttgaattatcgggaggaattattatccccgcgacgaaaaaaacgtttactttatcaggaaaaaatccagcaacaggtgaaatacatactttgacagaaacaatggcatcagctggtgcgcagagcagtgtgattacagttaataccaacacaggtgcaaaagagacaactttaaaagatattaatgttgtggggaaaaattattatggaactatttcggtttatggggctgcaaaaaacgtcgtacaaaactatgaaaatgttcactatcaaggtccgcaaatgatttataatttgaatggaacggcgaattttaaaggaaccaatgatataacaatagcgtccgttgtatctggttctgcggcaccaaatgaagtcgcggaaattaaaggcgttagtgcttctggcaaattgactattaatcatgcaagctcgaatgcgaatagtgctttttggttcggtggtggaacggctgaagtaaacacttttacagtggaagaaaatgcggatgtgacgataatatctaatgggactgggatgttttatcgttcaggaacgaagccagttgatatagatgtgaaaaagaatgcgaagttagacattacttctaataataatatcttccgagatacgccgggcggagcagttaaaattgctgaaggtgcggatgtaactatgacaaaaactgctggcgggaatccacttctatgggtggcagatgatattaccgtaagtcctgatgcccgctttatcttaaataaaacagggggaactggctatattatccagttttataatgcaacggcgaagttagatataaatgatcctcggagttttttaatcgcgacaaattcgaatacgccgatgttttactggccatatgctaatacatttaatttaagtgcgcaaatggtgaattactgggatacggctggaaccattgatcgaacggatttggcagcgcaaagttttagtttaccaaatggggaaaatgtgacggggagtttgacgtacactgggacaacgacaaaaattctgtcaacgaatgccgggatgacgccgactaattttaatcaaaacaccgcgcgaatgattgcgatggggcgacttgaaggaacgataaatcctgtgacagatgcagataatgaaattacaggaacagcgacaccaaacgcttttattaacatttcatatacagaaaatgggggaaataaggttttagaaggacagtcaaatgacgcgggaacttatcgaattgctatcccaaatggttttatcaagccatacattaaattgactacaaccatcaaacaagaccaaaaaaggataacattagatgatgtaactgtagaagatgttactccgccaagtggtgatgccgttacacaaattatacaacttggagatccatttccagatgtagccgaattagtaacaaatatttatgatcattccgataatacgtctggagcgggggttacaactactttacaaagcgcgcctgatactaatgtatttgggcccgcggaagccattgttcgtttagaagacaaggcgcataatcacgttgatatccgtgtaccagtttttattaaagatgatgcgacagagatacaagatggcaaagcgttacgagcggcggatttttccgtgaatgtaaaagatattaatgagcttaatgatgccgaactagagcaattcattttaaccaaatcgggagcaaaagcattccaaatcgaaactggcgaggatctaaccacggatgtgaaagtagctagcaccaatttaaaaaaagagacaggcacctacacagcaacgatacaaattggcggattaacgaaagagattgcgattcaggtcacgggtgagcttaaatttaatcatgtgccagaaacgatttctttcgaaacaatggggcttaatcaacaaaaaaatattgctaaacgaaatgctgactttgatttatctgtgcttgattcaagaggagcaggcgacaattttagcgtaacggcagctattaaagcaccgctaacttccacggcaaattcagcgcatactttgccaaatggactcatttttattgataatgctggtgagaaaaaaatcctttctgatgaaccaatcaccatttttcagtcgcagtcagctagtgacatgattgttccgatagaatgggcagaagaccgagggattttggtggaagtagatgcagcggaggcttatgtggatgaaagctatgaaacaacaatcgagtggactttgacggttgctccgtaaaaacctgttagcgaaagttaacaggttttttggcattataagtcctttgtttttctaaatgttgtagtttctcgtataatagcgttaagtaatttgcgaaaggtgggatggaaagaatgacttctgtaatgtggtttcggagagatcttcgagtaaatgataataaagccctctatcatgcttgtaaagaggacgatttgcttttgttatttcaagtaaatccagcacagttcatcacaggaagtcctagccaccaagctttttttgcaagtgtggctcattttaagcaagaagttgataaaaccgcgcttttacaaatcatgtttggtgaaccggtagaatgcttaaaacaattaaaagaaacgctaccaagctgggataaagtttatttcaaccgcgatgaaacaggttacggagcagagcgggacgaagcggcgaaaactttctttgacgaacaagaaatagaggttcaagccttccacgacagctaccttcactcagcagaagaagtaaaaaaatcccccacagaatactacaaaatctttaccccttactataaaaaatggcgtgaagaaataaaagaaacgccgttcaaagtgactttaaaggcagataatatacgaaaagaaaacttatttccaaaatacgaagaacagtttgccgaaatgacttgcgatttgccgatattagattctggtgaaaaaacagcgaacacaagactcgcgaattttattaaacacgatgttgctgactatgacaaagcgagagatttcccagaactggataaaacgagccatttatcacgctatttacggacaggagaaatctcggttcggacgatttggcaggcacttcaagaaaacgaagctacagaaggacgagccatatttgaaaaagagctttgttggcgtgacttttataatatgatttatgtttcttttcctaaccaaaaaaacgagcctatccaagaaaattatcgttttattgaatgggaaaacaaccgcgaatttttcaaagcatggcaagaagggaagactggttttccgctcgttgatgcagcgatgcgccagctgaaagaaactggttggatgcataatcgattaaggatggttacggcctcctttttaacgaaagacttgctgattgattggcgatttggggaaaaatattttcaacaaatgctgattgattatgatcctgcgagtaatattggtggctggcaatgggcggcttcgactggaacagatgcggtgccatactttaggattttcaacccaacgacacaatcacaaaaatttgatccgacggggaaatttattcgaaaatatgtaaaagagttagcgaatttacctgataaattcattcatcaaccagaaaaaatgtcagaaatagagcagaaagagtatggtttgctattaggaaaagactatccattccctttaattgaccataaagaacggcgtaaattagccattgcacgctacgagtttagcaaagagcattataggggaaatatatagacaatgagtcaatcatttaattaaatgattgatttttttgtggcagtattcacaaagaataagtcttgagcaaccttctaggagtaggaactcgggtatgttaaaattcatttatcaagtgataagggggaatcacaatggcacaatttttaaagctatttctaacgagtgcagtagttttcttggtttttgatcttttttggttactcgtagcttctaaaaaaatgtatcaacaatttattggggatttaatgggggatgtaagacttgctccggcagttattttttattttatttatgttgttggagttacttttttcgtgttacttcctgggacggaaaaaggaagtttaggttatacgatattagccggcgcgctatttggcctagtttgttatgctacgtatgatttgacgaacttagcgacattgaaggattggccgattacgatgaccattattgatcttgtttggggaacagctgtgacgactgtgacttcggtcattgtttactttattaatttgcatttcttctcgggagcaggttcctaatgatggagtctgaaagcaaacgtctattacaaagtatgctgaacggggcggcagaagtaattagtaaaaaagatgagctcaatcgaattaatgtttttcccgtagctgatggcgatacgggtagtaatttagcttctttaatgcaagcgattattgatcatgtttctccaagagaatattcaactaaggagttactggaagaagtggctagcgcggcgctcatcggtgctcgtggcaattctgggatgatttttgcgcaatatttaaatgccgttgcagagagttatcatcacatcgaatctacttttgatggattagttatagcatttcaaaaagcggttcataaagcttatgaagccttgttagatccaaaagaaggaactattttgtctgtgatgaaggcgtggtctgaggagcttgctggcacatacgaacaggagcgttctttccaacaatcgcttttaaatgcacaaatagttgcggagaaagccttgattaatacagaatttcaaatgccgattttacgaaaaaaccgattagtggattctggtgcgaaagggttttattactttatcgccggacttacaaatgcttattgtggtaaagcagtttctgcaaccgttcgttttatggaagtagagcaaacagcggaacatatgcatgttgaaacaagcgagccgaaatatcgttattgctcggaatttattatcaaacaagcgactatctcacatcaacatttacaggaaattctcgcatcaaaaggggattccttagtaattgcaggtaatgagaaacaaataaaaatccatatccacacaaatgaaccaaaagaagttttaagcctcatggcagcatacggcatgatgacttatcaaaaagtagatgatatgcgtctgcaatatgaagtaacgaaaaaaccgcgggcaaagattgctattgtgacggattcgatagctgatttgccagaagcatttttactggagcatcaagtgcatgtgttaccaatgaatattttagcgggagatgagaattttctcgataaattgacggttggcccggacatgatgcaagaaaaactaagaaaacaaactaaaatgagcacagcccagccaacgattcgaacggtcgatgccttattatcatttttagaaaataaatatgaacatgtgcttgttatctctgttgccgcgaaattaagcggaacttatcaattaatcaaacagcggataaaagtgcgagagttgtcttcggactggatacgtgtaattgattctaaattaaattcggtcgcgcaaggaattttagtgaaacaggcagtagaactagtggaatcaggtaaatcatgggaatctatttatcctgaagtggaacaaatgattgagcggacctttatttatgtggcggttgcagatttgtcgccgatggtgcagtctggcagaattccacgggtgttaggaaagcttgcacagaaattatcactctatccgattgtaagtttggacgaatccggggatggcaaattgataggcgtatcgtttagtcaaaaacaaagtatgaaaaaaatcattaaaaaaatagcaaaattacagctgaaagagctggcgattacacatgtttcttcaagagacaacgcggcaatttggcagaagcaacttgaaaaagaaactggaaagatcagctacttagtggatagttcagcagccattgcgattagtgctggactcggaagtgtcgcagtcgcggggattaaaaaggaggaaacgatatgatgtattggacagtagcactcgctttacttgtttactttatactctggtttattatttcaaaaataaaaggaaaatattcgctcgttgatattgcgtggggtggcggctttgttgttgtagcatggactggatttttaacgacatttagtgtgacgacacaaagtataaccattcttatattagttacattatggggtgttcgtttgttttggcatttagcgcgccggaattggaacaaaccagaagattatcgctacgttaatatgcgcaaacgctggggaacgacattagttaatttgaaagccttcttaaatgtcttcgtgttgcaaggtgttttattatttattattgctttaccgattacacatagttttgctaatgaaacagcgacattcgcttggtggcaaatcctcggtattgttatctggattattggctttatttttgaagtcggtggcgatttgcaattagaaaactttaaaaagaacccggcaaataaaggtaaattactaacttcaggtttttggtcggtcacacggcatccgaattattttggagaagcacttagttggtggggtgtatttttagttgccttaacgcaattaacagatttatggctgattactagcccaattgttattactttactattactatttgtttccggtgttccgttacttgaaaaaaaatatcaagatagagcagattttcaagcatatgcgaacaaaacgtcaaaatttttcccgtttattggtaaaaaaggtctgtaaaaagtagtgatttcatcttactaatgctattaattgctatttgcatgagagagcgagtaaaatgaaagataggtacgataaacagtatctgaatataatactttatgaggcgagaggggtacaacagatgaaaaaagaaaaaacagtgttaattatgaattttgatgaagaaagtatatcttaccaagctttctctgaaatgaaaagattgcaccaagaacgcaaaatcattggttatcaaatggcggttgtaaaacacgagccaggcaataaacttgttgcacaagattttcttgattttactggtgccgataaaaatatgaaagatagccttattggtatgttaattggtattttaggcggtccatttggtattttaattgggtggatggtcggcgcaatcgttggttccatgcgagatgctggcgaagtgaaagatgctttaactgtatttgaaagaacattaaaaacaatcccagaaggttctacaggtgttatccttattgcgacagaacaagaattagcaaatgtaaacgacgtagcaatggatgagttacatggccgcgtgcaacgtatggatgaagctatcgtagcccaagaaattaaaagcgcacaagaaacagaaggaaaagcaaaagattctgctaaaaaacattggtttagtaaataaaaatatttcaaacgaggacagagaaatctgttctcgtttttttgtgttttaagagtttgaaaacggggaaattaacaacataaaacacccagatagaaaaaaattcaagatggtaacgcttaactcatttttattttctgaaaactatttgcatcaaattaaaaacatgctacaataaacaagttgtgaatttcacaagaaaattttttgtttggagatgaaataatttggatgtggaaagtagtccattaatgcagaaaattgattatagtacgcgcaaaaaaattgatttagtaaataatagtattcttcgttatatcgtgcgcgcgatgttagcatgtttattcttaactctaggaactgcggttgctgtaatgattggtgataaagtcgatcatttcgctccaggacttggtaaaatcacctatgcatttatgtttagttggtcgctcgttatgattatttatatgaatgctgagcttggtacttctaacatgatgtatatgacaactggtgtttatcaaaaaattgttaaaccaggaaaagcattacaaattttgcttttatgtattgtttgtaatttattgggtggaattcttgcagggtacttagtttctctgacatctgttttccataatttacctgctgatcatttcctatttactgctgttagcggtaaacttgaaaaagcacccctacaaatttttgtagaaggtattttcgccaatattgttgtaaatacggccgtgctttgtacactccgaatgaaagatgatgctggtaaagtcattgcgatgattttcattattttcatctttgcattcttaggatttgaacacgttatcgccaacttttcttcattctcattagcatttttcgcttctggtggaacacttgctgcaatgacagcgggcaatgtgaccgtcaatttagtccttgctttactggggaattttgtaggtggagggcttgttatcggactcggctatgcttggcttaaccgaacgaaatcaatttataaagactaatataaagagacctcggaaattttccgaggtcttttttttatatgcttttaacaggtaaattgcttaaaaatgaacgaatgagcggttcgaatttcggcacttctttttcaactagaaaagcgtcatgaccgtattcagaagctacttcatgataagtaaccggcacatcccattcttttaaaagctcataaccacggcgcaaatcatgaatccggaaaagctgatcggttgtaatgccaatgagcaaataaggaattttaatttttgaaaaagcgggtaaatcatctttcgcaggagctgtaacatcaaataagtcaatcgcctttgttaaatataagtaactattcgcgtcaaatcgctcgacaaaagtatccccttgatattgcaaatacgattcaatttgaaaatgctcttttgagaaagccgcaggggatgactcggctactgtgaatcgttcaaatcgtttcgagaaaagttcactcgtccgataagtcatcatcccaaccattcgcgcagtggcaagtccgccctcaggttgaccaacatagttgccgccattaaagtcaggatcattcaaaatcgccatgcgcataatcaagttgtaaccaatcgcgtcagggccggcagcaagcggggaggcgatattaataatgctatcagttatatcagcataatcaatcgcccattccgtcgcctgcataccacccattgatccaccaatcaccgaaacaatccgtgtaactccaagttgttccaaaagctcacgctgcactttaattatgtctttaatcgaaaaaccgggaaactgtaaacggaaaggctcgcctgtttttggattaatagaagaaggtccagtcgtgccactacaaccaccaaatacattggtacaaaccagaaaatatttgtctgtatcaatcgttttccctggaccaatataatcatcccaccaaccaggcgcatcatcctcgaaatgtttcgccgcatgtgccgtcccagtaagtgcgtgctctaacaaaatgcaattatcgcgtgaggcagaaagtgtcccatatgtttcatagccaactaaaacagggcttaaagtttctccattttcaagtagaagaggacttttttgaaatagttctttttgttgtaaggtcacttctcttcacttcctcctaaatttgctctaatgctttcgttaaatcttggataatatcatccgcattttcgattccgatagaaaggcgaatagattcaggtttcacgccagctgttaattgttgttcttcgcttagttgttgatgtgtcgtggatgctggatggatgataagcgattttgcgtcgccaacattggctaggtgtgagaataattccacagattcaatcacttttttcccagcttcatagccacctttaaccccaaaagtgaaaatggagccaggtccttttggtaaatatttttgggctaattcgtggtatttgttgtcttttaaacccggataatttacccaagctacttttggatggtcatttaagaaattggcgacttgtttagcattttttacgtgttgctctaggcgaagagacagggtttctaatcctagaattaataggaatgcgttgaacggggaaagcgctgcgccagtgtcacgaaggagtgagacgcgtagtttggtaatataagccgccgcgccaacgtcatttgtataagacagaccattgtagctatcatctggcaccactagctttggaaatttgccatttgcccagttaaatttacctgaatcaatgaccgcgccaccaattgcaaccccatgaccaccaatgaattttgttgccgagtaaacgacgatatctgcgccaaaatcaaacggccgattcaaataagcggtcgcgaatgtgttgtcaacgatgagcgggatatcggatgcgtgcgcaatttttgctactttttcgatatcaacaatattaatatcaggattcccaattgtttctataaaaacagctttcgtattatctttaatcgctttttcgaaattttctggttcattagggtcaacgaaagttacatcaattccaaaagttttaaatgtatgggagaaaagtgtatgcgttccaccgtaaagtgttgcggctgcgacaatatgatcaccagaaccagcaatatttaaaatagagtaagtaatagcagccatcccagaagcagttgcaaccgcaccaataccaccttcaagtaaagttaaccgttcttctaaaacagctgtggtcggattcataattcgtgtataaatatttccagtttcttgtaaaccaaataaggctgcggcatgttccgggctatcaaatgtgtatgacgtcgtttgataaataggtacggctctagaatgtgtatctccgtccggtgtgtgtccgccgtgtacttgaattgtttcgaatttatactcattactcataaaatccactcctctttgatatgtatttatcagtaatttccatcaaaaaacctccctagcagtatataagccgccagagaggatagagtttcctaaacttggatttccgacttatctttcagaatatactgctggaattagcaccgtgaaaataaattccggttgctaaggcttcaaagggccagtccctccacctttcgtgataagaaaatactattaaattaagttatatattacgctggatgccatcaattgtcaactatgtactgaaaaagtctaaaattagtactttttgtgttgaatttgtgacaacgacgtattttttaaaagaataattttttttaaaaggttttaaattcgttttttaggctattatagttaagactaattatatttcattaaaaatggggttgaattagaaaaaataaaggggagttgaaataaaaaatgaagacttttacacgaattcttgttttattagcggggattgcaatgattatactaggggtttggttcttattccatccaggaatttcattattaacctccacattaatgtttggtttcttattactgatttctggtattttccacacaatctcttacttttcagacagaaaatcacaaaatgtttctggctgggtactagctgacggaattttatccatcttactaggtttcttgctattatttaatgaatttgacggaactttaacactcgtattacttttcggtatgtgggtattattcgctggtattatgcgtacaattggcgcattcactgccaaacaaaacaatgtacaaggctggggctggattttaacaatcggtattatcggtatcattgttggttttatcgcgctattcaatccagttgtttccgcaattggtatcgtccttgtcgttgcgattttcttcatcgttcaaggtatcggcgcaatcgcaacattcttctttattggtaaaaatagttaataaaaaagaagctatcttagttagatagcttctttttattatgcatatttttacgaaatacaattagaaaaaagtattcattttgcactcatatgtaaggttcgtgattttcttttagtttttgcttatgaatctcgaaattattaacacgccaaggttttggcgaaagcgcaataatgccatcttcttcaagctttcgtaggttagttgcaacgtaagctcgagccaaatttagataatttcctaagattttttgggtgaaataatagggaatcaaacaagaaccatccgactcgattcttccaaatctctccccacaagcaattaatcccgctaaaactttctcgctagaagggagattaacgtaaccttcccgttctaacataggtgtaaccatactttgcataagtgcattcatctgccaaaaaacatctggtgaacttaagaatttattaagaacatatttacgttcaaattgataaacactcacttcacttatcgttgtgtaatttactggtgattttgccccgcccagaagtgtaagcggcccgatacattcttgtttacccaagaagttaatgatgctatcttctttacaagtatttttactcatagaaacgacaccatcttcaatgatgtagaaataatcagtttccgcgccttcagctaaaatctgttggttgcgcctaaagcgaattcttttatatggaagaactgcttcactagaatcttttaataaattgagtaaatctacgttgtaaaagctattttcctcattcagtaatgacatataccgagtccccttttctcagtgttaatcattatcattatataggagatgactcgaaatgtgtattaatgggacttatgatgctcggagtaatttggctttaatcaaacgatcacgaatgataatgcctaatagcgccgcaaaaaccgctttgataatacctggaataatgaaaggtaccattccagttaaaaaggcagttggccagtcgagtcctgtactgactttaagccataaaacgccgaaaatcagggtgacaatagcgcctaatatgttcgccacaatcgcataagggacagtgaattttgttttttcgagtaaccaacctgtaaggaatgcattaaaaataaatccgataataaatccaccggttggcccaaaaataatcccaatacccgctgtcattccttggaaaacaggaatccccacagcgccaagaacaatgtaaactaaaacagatatcgtaccatgacgagctccgagaatggtggcagctaacccaatggcaaatgtctgtccagtaagtggaatagggccgagtggtatagcaacttgcgcaagtaaggcaataatgactgcaaataaagcatctacgactaaaaatttcaatttctgatcacgcataaacttatctctccttaatgtaaacttaatactttaacaggttaacatttatggaataaaaaaacaatactattttttctagccagtaccttgcaatgaacactagtgtatgttaaactatagtggtagtgaacaatatatagtagtggttacttattactagtgtgcaatttaacagaatggaggagttagcatggaggttaacccgcagttcaaaaaaggtgtgttagaactttgctgtttatttttaattcaaaagaaagattgttacggttatgaattagcaaatcaagtttctaaatatattgaagtagctgaaggtgctatttatccggtacttagaagattagtaaaagaagagtactgttccacttatttagtagaatcaaatgaaggtccatcaagaaaatattatcagctgacagtaaaaggcgaaatttacttgaatgaacttatttctgaatggaataattttacagacagcgtcgcaaagctattaacagagggggaagcagtaaatgaataaacaagattttctcaatgaattaaatcaacgactggaattgcttgatccgaaagagcggagagaattattatcggactatcaagagcatttcagaaatggaattgaagccgggaaaagcgaagaacaaatcgtttttgaccttggtaagccagaagaaattgccgcagatattatcagtgaacgtggtattcgcgaagaaccaacagaaatggattactattatgtcccacgaaaaaaccaaaatgaaaatagatcagtgagtaaacaaattttaattggcgtaggcttatttttattagatgtttgtcttatcattccaattatggtttcgctttggtccttggttatctccctttgggtgacagttggtgcgtttcttctatctccggttatactcggtgtaggaattttatttggagctgatttcgaattttatcaaatgtttgtttctattggacttgtaggtttggggctaatgcttttatttgtagcaaacgcgctaactcagcttacaagtaaagtaacaatggcgattatccagtggcataaatatgcggtaaagggaggcgggaaaaatgcataaacatcacttaagcaaaaaactatttttcgctggtttggtactatttattattggtgctatcggtgtagcattcacaatgaatacaggtaaaatgattgaaaaaggagaaccacttacaaaacagtgggacttatcaactgaaaatattaaaaaaattgctttttcttccgagcgtgatgcatcaattgaatggaaagaaagtacaactggaaaaaattatatcgaactaaaagggaattactctgccaatgacaaaaaggcaattcaacaattagagccagtttctgaagatgggacatcctttgatataacggtgcctgaagaagatgattggtataacggctttggcaaaatttacgcttatggaaaacaaaaagtaacaatttatttaacaaaagatactaaattagctgatttagaagtgaaatctcattcaggagatattgatgtagctgattttaaagtaaagaaatttgttagttctactaattctggggagttaaaagtgactaatctggaagcaaatactgctcaaatggctacttcttccggggatttaactttatcgaatatcaaagcaaattcgtcaattgaaacagattctggaaaaacagaattgactaatttaactggtgatttagaagtaaatggtggctcgggcgacgttaatgttgctggagttaaagcaaagaaacttaaaattgctattgattcaggagacattgagctgactagtggtactgtaaccgacttagctgttttaacaacaagttctggggatattgatgcaaatacaaaaggtaaaatccaagctgaatccgattcaggatcaattgaactcgcgggcgcaacaaataatgtaacggcgaaaacgagctcaggtgatatcgatgtagcatttaccaaacaggtgaaaaatatcgaaatcaattcagattctggtgaagttgaacttgagctaccgggtgattttaaagctatttatgaagcaagtagtaattcaggtagcgttaaagcaccaacaagtgattcgaataccgataaccgcgtaacggtgaaaacaagttccggagatattaaaatcgaaaaataaaaaatcagtgcgctaattatttaattagcgcattcttttggttaaaaaggggtaaagtcagataaactgtttcatcaatttgcgcaagtgaaaggggaatggatgatggattttcatattagaaaagcaactaattcagatgccgaagccattcagcatgtggcgattacttcgtggcatcatacctatcaagatttaattccaggcgatgtacaagacgattttttggaaaggttttataatgttgaaacgcttcataatcgtatttcagcaactccttttgctgttgtggaacaagcagacaaagtaattggatttgcgaattttatcgagcttgaaaaggggaaaagcgagctcgcagctttttatttattgcctgaagtgacacaacgcggacttggcacggagcttttagaagtaggaatgacgctatttcacgtgccactaccaatgtttgttaacgtcgaaaaaggaaatgaaacagcgattcatttttataaggcgaaagggtttgttcaagtggaggaatttaccgaggatttttacggttatccgctggagacaattcgttttaatttgaatcatcatgcgtttgaagaagaataaaaaaatgtctattctagttgaatgaatcaattaggatagacatttttttatttcgtagcggctttgccactagtagattttccaccgcgcaaaaagaagaagataatggcaagtagcgccatgataactcctgcaagaatggatacgccaacggaaatgagcatgccggaaacttggataatgcttaagatgatgactgctgcaacaaccccgtaagcgaagccccatatagcaaatgtgaagtaactagcctttttactaaatccgtaaaatatttcacctaacgtagaagcaactaaaattacaggagctgcaaaaagtatcgctgaaaacacaagctgtggcgtaacattgtcatagaggattgtttcgactaaaagcgcagaaaaaattcctaaaacaaaaatcgataaataagcaataataaaacgcatcaaaaaacctcctaaagtacactatattatagcataaattaggaagttagcttaacatctagcccagttatcgtcactatgctttacgatacgtgtaattcctcgaatcaagttgaaaatgagtattgatacatttagaaaaacgataaaaaatacagtagctaaggcaagaaagttaatggtatctgcactattggtactaaatggtacattattgtaaagtaaaatcattacaacaataccagcgacaaatgttgcctgcgtgaggagtgcccattttacatgatgccgtatttctttatcttttgttgtgcaccagataattgcgggagtaatgaccggagcaaagaaaagactgaaataactaagcgcactaataatttttttatctaacatttctcatctatcctctcatttgtttataagtctagtatagcggggaaagagaaatggaaccatcgaattaggtgacgatatagagaggaagatgacagttttgtcatgtaaaaacgccccttcgaataaatcaaagagacgtttctttatatgactgattttaaagaccaaactttactgcgccatcttcggtacattagaacagctcgaaccccttcatcaataatgtaggcaagccaaacaccgactagcccaagcccagcagaaataccgagtacataggagaacggcaaactaacaatccacatgacgataagtccacatataaatggaaaacgaacatcgcccgtagagtttagactactaatgatgataatattcgtcgcacgtccaagctcaaggaaaatcgaaagtaagaacaattctttcgtcatcgcaatgatttccgtattcgtagtaaacagtcgcataattggttccgcgaaaagataaatcgaaacgctgacaacaattgctacaaccaaaccaattttccaactacgtagaccttgcttgtaagctttatcaatttcttttgcaccaaccgcacgaccgataatgatttgagaggcctgaccgagcgcgatagcaaagagcgcgacaaactggctaaccgtcgaagcatatacttttgtcgtaagtgcctctgtgccaagaatcgcaataattgcagtaacaactagttgtgagccggcataggataaattttccccagcagagggaaggccaagtcgtaaaattgaataaagtaattttttggaaacttgttccaattttttgaaatggaaagtgtagccaatatattttcgaagcatccagatggctagacccattccgacgaagttagcgacagcagtagaaattccgacacctgccacgccgtaatctaagtatgcaagcgggccgtaaagaaataagtagttaccgacaacattgataatactaatcgttactggaacaagaatggattgccttacataaccgtgtgcccggagaattggcaaaattgaagcatgaatcgcgataaccaccgaactcccaccgataatttctaaaaacggcgcaccaacttgaactaaatgaggatcaattcccatccaagtcaggaagtttttcgacataaaaatgaaaataatactcatcacaattcctattaagaaagctaccactaagccatttgtaattacattttcaatttctttatgttttttcgcaccaatcatttgggcaacgataatctgcacaccaacgctgatgaagccgtaaataataatagaaataacaagaatctgattcgcaacccctgtcgcagctaccgcgtcatctgaataatgccccaacataaagacatctatataactaatcatcagacgtaaaaattgctctagaaaaatcggccaagcaagcgtgaaaaggcttatgctggcgactttatgtactgaactcacttatttccctcccttcgcattaacacaattaaagccattataaggtaattaaagttaaaagtatagattaatttcaaaaacgctccaagatattgcttgacaaaaatcgaatatctcatataattagttaggtaaactaatcaaatgatagaaagaagtggagaaatgtcttcgaaaaatcaagacttggggcactcagtaatcaaggctttcatgaattttaagcatgctgaaataaagagtttccaaattccaggttacagtaaatctgaaacaagatttatttttattttatctcgtgggcttaaaagcagagggccaaaaattcgtgtttccgatcttggtcatatgctcagaatttcaaaaccaagcgtcacgcaaatgattcaatctttggaaggaaaaggactcatcaaacgagttcaaaacccagaagataagcgctcgatgtatgtagaattaacggaagtcggagcaggcgtgtcagaaaaaatgctcgatgaatttcaagctagttttgaagatatgcaggagtttttaggcgaagacgatatgaaaaaattgattacactcctagaaaaactgacagattacttaaacacaaaatccgaaaataaggaggcataaaccacaaatgatgaaattgatgaaaagattaaaaccttattggctgagcattacggccgtattagtccttactttcgggcaagtcattggacagctttatttgccgacgcttatgtcgaacattatcgacaaaggagtcgtaacaggcgatacagactacatttggagcactgggatgaagatgctcttaatctcgtttgcttctgttatcttgtcggttatcgtggtttatctcgcatccagaatttccatgggattcgggaaagaattacgagataaaatttttacgaaggtagaggacttttccttacaagaattcgataaagtaggaacttcctcgctgattacgagaacaacaaatgacgttgttcaaatccaaaatgtactttatatgatgatgcgattaatggtgatggcgccaattatgttgctcggcggtattattatggcagttggcagggacgcgaaattatcgcttatttttgtcgttgttttaccgctactacttctattagtagttattctcggcggaaaagcaatgccaatgtttaaatcgctccaaaagaaaatggataaattaaaccgtgttattcgggaaggtttaacagggattcgtgttgttcgttcttttaaccgcaatgaagatgaactcgaaaaatttgaagaagcaaacgctgactatgctactacggcgattaaagttaaccgactgctttctcttatgagtccattaatgatgctactgatgaacttaacttccattgcgattgtctggattggttcgatttttattggtaatggtgatatgcaagtaggggacttgatggcatttattcagtacgcaatgcaaattatgatgtccttcatgatgctttctgctgtatttattatgattccacgtgctggagcatctgctgaacgtattaatgaagtgttagatatgaatgcagaaatacttaatccagaaaatccaaaaacaagtacaccaccagcgaaactttcttttgaacatgtgactttccgctatgaaggcgctgaaaaaccagtgattgaagatattacttttgaagctaatgctggcgaaacgattgctattataggaagtaccggtgctggtaagtctactttaattaatatgattccacgtttttatgatgtcgaaagtggtgttgtaaaaattaatggaattgacgtgcgtgaaatggatcaatccagtttgcgccaaaaaattggacttgtgccgcaaaaagcggttttattcactggaacaatagcttcaaatatgcgctacggtaaagaagatgcaaccgacgaagaaatttgggaagcacttcgaacagcccaagcggaaaattttgtatctaaacttgcaaacgggcttggtagccgtgtagagcaaggtggtaacaacttctctggtggacaaaaacaacgtctttccatcgcacgttctttaattagaaaaccagaaatttatatatttgatgatagtttctcggcgctcgatttcaaaacagacgcgaaactgcgtgaggctttgaaagctgaaacaaccgaagccgtgacacttattgtggcacagcgtattacctccgttgtcaattccgaccaaatcatcgttatgaatgaaggtaaaattgccggaatgggaacacatgaagaattaaaagaatcaaatcaaatttatcaagaaattatgaggtcacagctgtcagaggaggaaatcgcatgagtggtccaggtccaggtggtggcatgagaatgcaaacagccgccaaaccaaagaactttaaacaaacactattccggcttcttggctatatgaaacctcgttctgtcgcaatcattgttgtatttatctttgcgattttatctacgatttttaacattttcagcccgaaagaactcgggaaagcaacaacagaaatttttaaaggtgttatgagccaagatggaattaataacgataagatttttaatatattaatgattgttttagtcttatatcttggtagttccttatttagctttattcaacaatatgtgatgtcgagtgttgcgcaacgaactgtttatgacatgcggaaagatttaaaggcgaaaatggcccggcttccgctgaaatattatgatacgcgctcaaatggtgatattctaagtcgttctgttaatgacatggataacatcgcgaacacgctacaacaatcactaacgcaagccattacagcgattgttcaaatgattggtgtcttaatcatgatgctaacaatcagctggcaaatgacgctaatcgtgcttgttactgttccaattagtattattctagtagcaattattgccggaagatcacaacgctatttcggcgcacaacaacgtaatcttggtattttaaatgatactgtagaagaaacttacggcggccaaacaatcattaaagcctttggtcaagaaaagaaaacgttagtaaaatttgatgaagtaaatgaagattattttaaagcagctaaaaaagcgcaatttatttccgggattatgatgccggtaatgcaattcgttgggaacttaggttatgtaggtgtctgtgtggccggtggtatttttgttactaacggaacacttcaagttggggatattcaatcatttacgcaatatgtccaattatttacgcaaccaatttccagcgtagcaaacatcgcgaacatcattcaatccactattgcatccgcagaacgtgtatttgaaatgatggatgaagaagaagaaaaagacgaaattccagcaaatgttaatcaagttgctggcgaagaacatagcattgtattcgaccacgtgaaattcggttacactccagataaaccgctaatgacagacttgaatattcatgtggaagaaggtcaaatggtggcgattgttggtccaactggtgctggtaaaacgactattatcaacttgctgatgcgtttttatgacgtagatggtggtcagatccgtatgaaaggtattgatacacgcgatatgaccaaagatgctgtccgcgaaaaattcggcatggtactgcaagatacttggttgtttaacggaacaattgccgacaatatcgcatacggtcgtgaaggcgcaacgaaagatgaagttatcggggcagcaaaagcagcttatgcagatgatttcattcgtagacttccaaatggctatgatactatcttgaatgaagaaggttctaatatttcgcaaggtcaaaaacaattactaacaattgctcgggcgattttatccgatccatctattttgattttagatgaagcgacttcaagcgtagatactcgtacagaattaaatattcaacttgcgatgggtaatctgatggaagggcgcacaagctttgtgattgcgcatagactttcaaccattcgtgatgcggacttaattctcgttatgaatcacggtagtgtaatcgaacaaggtacgcaccaagaactacttgatgcaaaaggcttctacgctgacctttataacagtcagttcaccggagctcaagcagtttaaatgtaaaaagacaatgtggctgtgagctgcattgtctttttttgagcagaaaatttgtttgatgatggaataggcgttatggttaataaagaagaaattgaagaggtgaaaatagatgtatcaatccattacggcaaatgatttagagcaagacttaaaaaaagtgccacataatattttagatgtcagagacgcagatgcttttgttgaagggcatattcctgatgcaataaatattccaattaatgaactaccagaaaaattagcaacactggataaagaaaaagcctatacgattatttgttacgcgggtggacgttctgagcgcgcgagtcaatttttagccgcagaaggttttgacgtaacgaatgtaatgggcggaatgggagcatttcacggtacagtaactaactaaataaagaagccgcgacctaaaattaggttgcggcttctttttatttagctatgttttcttttccggaaaaagaggatagctactccggcgaggataataccgattaatacagtcgtcgcttgactcgcgtcgccagtatttggtaaagcgatatttacttctgagttagacggatttgatgcgatttcagatttcgcagattgtccattatctgggttgggattgatatttgggttattaggatttggcgtaggatctggtgtgggatcagggccgggaccaggtggcgtcggaggttcatttcctgctaccacatttactaaaataataactgggtctgcatttagcccgtcggcacttaccgcatttaaagttactttatacgttccaactttagctaaatcaacaacgctatcaaaatcacttgttactttactaccatcacttgtttttgctgcaatatcttgtaaaaattgttgctctgtcttggttgtatctttcgtgtaagaaatgctcttatctgctgtgatgactggttttgcaagtatggtcaccgttacttgtgttggcgttgcttttaaaccagctgcattttcggcatttaatgttaccgtatagacaccaggtttgctaaagtctacaatcgtattaaaatcactagtaacaggtgttccatcatctgtttcagcatgaacatcttttaaaaattgttcttcggtaacggtagtttgctctccataacttattgcagaatcattcgtaatcgttagtgaatgatcaatgtcaaaatagtggtcataagttccgctagataccgaataactattgaaatttggcggagaattataagatccagctggattatcataaaaagcattgtattccattttagtaatagaatcaaagaaatcttttgtaatcccgcttacggtcactcctgtatcatcaatgctcagacgactaccactaatttgcacaccatttaaggtgaaataagtgctagaagatgctgtatttgttgtgaaagggaataaataaccgtcgaagttcatgcttcgttctgtcattaaagtaaacggtacaaagatagtttggttggcttcgttatagttcaaggcagagcttttaatggtactgttaattaaaatggcacttcctacattttgtccaaaagctgctaaattggttaattttgggaaagaatcaattccacggaaatcgttaactccacaaaattggataaataaactggctaagttaggaagggatttgagtggcataaaatcagtgatggaaggattattgtctaaattcaaaaaagttaaatttggaagtttattaaattttgtcaaagcactattatctagtttaccggaacttaagtttaagttggttacattcgttaaaccatttaaatcaggtatggaattggttgttaaattgcttccagagatattaagattagttaaactagggatatttgcaaccaaagagtaatccgtcacacctgtatttgttaaatgtaaaatagttaagttgtgcgcataatcgagtcctgttaaatccgtcaaactagcattactaatggtgacgtctgtaatagtgtccatttgtgcttcagtaatatcacttgtgcttggttgtcctaagagcccatttagataacttttcaaagccgggtcaggaatgttgacaacatcttgagcggcttttatactaatattttcttccgctgagacgttcgcggaaaatgatatagtaaatggcattattaaaaggatgcacaaaccaattttgactcccatttttttcataaattatatcctcctttaacaacttttgtttggtataatcgtatggattcttaagacaattcctcttttagtaatatgttaaacaaaatagtgtcaaaagtgttgttaaattaaatcgcaaaaaaaccgtgaaagaggttttctctttcacggttttttattaaaagattttagctaattctactgcttcttttgctcctgcagagataatgtcttttgcttgatcaggttttgcgttatgaccttctacgataaccatttctggctcagagataccgaagtgagctagcacattttttacatagttcaaggacatttcaaagctttgcattggtccgtcagagtaaatgccaccgcgagcgttaagcagggcaatttttttatcagcaactaaaccaacagggccgtttgcagtatatttgaacgttttgccagcttgatttaaatagaataagtaagttaaaaattgtgctggaatgctaaaattccaaagtgggaacgccataacgattttatcagccgctaaaaattgatccaagtagctattagcaatatcagctaaacgtttttcttctgggcttagtgtttctccagctgcttctttatgtaatccactcatcattgttacatcataataaggtagatccgcttcaaataaatcaagttctgttacattatcatccggatgggactttttgtattcagttagaaagatttcgtatagtgccacgctgactgagcgttcggcaggtaaaccatttgctttgatgaaaagtacgtttgtcattacatcttgcctccattttttttgaattatccattaagtgtagctcattttcacgataaacagcaagcatattgcttacaaaaaattagccgctaatgtttgagcagatattttgtgcttttgaaaaggaagcgtataatagttgatatatcatttgacgtatcaactatggaggtgaaaatactgaaaccatgtacagaacgatcagaattactttaccggatgcacttgttatccaaggaaattagtcatgtgtttgaacaacaaacgaatatgagttttacaaaagtagagattttatttcatattcaacaaacaccgggccaaagccaaaatcggctaagagagaagctttacattgattcggcgagtattacccgtcatttgaagcgaatggaagagcaagggctgattgttcggaaaaagcaagatgaaaacaaacgctatacgtatttatttttaacatcagcgggtgaggcggaattagccactttacttttggaaaaagaaaaatttcagaacggggcgctagaagctttttcagaggaagaagttagtgcattacttaagtcagtcacaaaaatgatgaataatgtagagaaaatggaggagaagttaaaatgaaagcagtagtaatcgaaaattatggtggcaaagaagaattaaaagaaaaagaagttgcaatgccaaaagcgggaaaaaatcaagtgattgtaaaagaagcagcaacatcgattaacccgattgattggaaacttcgtgaaggatatttaaaacaaatgatggactgggaattcccgattattttaggctgggacgtagcgggtgttatttcagaagttggtgaaggcgttacagattggaaagtcggggatgaagtatttgctcgccctgaaacaacgcgttttggcacgtatgctgagtatacagcggtagatgatcacttacttgcaccacttccagaaggtattagttttgatgaagcagcatcgattccacttgcaggcttaactgcatggcaagctttgttcgatcacgcgaaactacaaaaaggtgaaaaagtcttgattcatgctggtgctggtggcgttgggacgttggcgattcagcttgccaaacatgcaggagcagaagtaatcacaacagctagtgcgaaaaaccatgaattactaaaatctcttggcgcagaccaagtcattgattataaagaagttaattttaaagacgtcctttcagacattgatgtagtttttgatacaatgggtggtcaaatcgaaacggatagctatgatgtattaaaagaaggaacaggtcgtttagtaagtatcgttggtatttcaaatgaagatcgtgcgaaagaaaaaaatgtaacagcaactggaatttggcttcaaccaaacggcgaacagttgaaagaactaggcaaattgctggctaataaaacaattaaaccaatcgtcggcgcaactttcccattctctgaaaaaggtgttttcgatgcacatgcattaagcgaaacgcaccatgcggttggaaaaatagtcatttcatttaataaataagattttcgaaaagctagatgctatcatctagctttttttgctgtttgctggaataatatagatgggctataatagcaaaaaaaggtggtgtctaaatggaaacaagagaattgaagaatgggcaaataatgatgattcggaaagctacaaaagaggactctagtaatattattacttatttaaatgaagtagctggtgagacagattatttatcatttggtcaaggtgagtttgcgtttagtatagctgaagaagctgaatacattgaagaaagcgataagaatccaggctctgttatgttgttatgttttattgatgatgaacttgcgagtatttctcagcttattggccatataaaaaagcgagaattacatacttctgaactagctatttcgatacggaagaaatattggggcctaggtattggaacaatttgcatggaggaattaataaaatacgctaaaagcagtgagtatttaaagcttatctatttagaagttgtaacagagaataaacgcgcaattaatttgtacaaaaaatttggatttatcgaagctggtgaaattccagcattaatgcaagtggacagacgatatttagatgtaaccatgatgtatttggttatttagtcttctataagaaaggctagatcattagctacttctatatcactaagttgtttcgcgataatatcggccccagtgttaagaaaaatagcaatttgactaagaacacgaaggctaatgtcagaagtacgaatgtctttatcaataattttctgtaaagatccttcttttaagcgagtattggattcaatatcagtggcagtagtgttattatttgctaacaattgttcaatcggatgcatcatttcacctcgttttaatagttaactttatgaattaattataactaaatttgcttcttggataaactataaagccttgaaaattaaacaaaaaagggagaagcaaatgaaagatttaaaagacagttttaaagtattgtatcagtttaagacagattatctcaaagtaactttattattaacaatcttgcaggcatttgtgattggaccatttatctattatttctttttctttattctccgagttatcggagtgccagggattacagacgccaatctgggagaagttttttcgagtcctgttgccattattatgctgctgattttagctttactcattttattatttgtatattatgaactgggtttctttataatgatggcaatttatcaattgcggggagaaagctatacctttttcaaaatcatacaaaggctcaatgtaaaagcaaaatactttcttagttatcaagcaatttattttctgctatatttctttttacttttgccaattgcaggattatctttaccaattacgataacagaaaacctctatttaccgcattttattacagatgaactaatgaaaacgacgacgggaacgtggctgtatgttattgcaattgcgattattttctatattagcgctagacttgtgtttgctttgccatatttcattgaagacaaatcactaaaaataagtggagctatccgaaaaagttggaaatacccgcaaaagcacttatttttcatgttactaaaatgggttttaataattgttgcgattggctttttagtatcgattatcgcgacgattattatgttgccacttctcttggtagaaaaaataactccaggaattgcggtggttatagctggtattactttaaccatactgcaagtgataggtttctttgccgctggaatttttcaaggaatcattgcgcaattattagtgaagaatgcctttgctataaaagaacaaccagctcttgtgacgcgcagccagttcccgcataaaaagagatttattattgtagcaataatcattttcattatttttagtagttttaatatttataccgtgaatgcaactttatatgaacctaatacgaaaataattgcccatcgaggtgatacaatgaatgctgttgaaaatacagtggaagccattgaatcagctgcagaggccggggcagattacagcgaaattgacattcaagaaaccaaagatcatcagtttgttgttttccatgatatgacgctgagaagacttgctggcagttctaagcgagtagcagatatgactttaaaagagttgcaacaaactaaagtaaggagtggcgactattcatctcatatagcttctttcgatgaaattatcaagatagcgaaaaagaataagatagatttactcgtggaagtgaagttacacggcggggaatcgagcgatatggtagaacgacttgtcacattgttaaagaaagaaaaagtaactgataaatatttagtccaatcgttggaccaaccagttatcgaaaaaatagaacaagccgaccctacacttgaaacgggcatcatattagcgcttaatattggaaacttaccaaaaacatctgctgattttattgttttagaagatttttccatcaataaacgattacttacacaagccaaacaaaataataaaatggtatttgtttggacggtaaataaagaaaaactaatgcaaatgtatttgcggaagaatatagatggaatcattaccaattatcctaaaaaggcgatagaacttagggaatcttttaatgaaaatgattctttgcgaagtcgtattgagaataggttaggattttaaataaaaaaagccgcaaacaatcattgtttgcggctgattattattttagttcaaatgattttttaacagagtttttgctaaagctaattaattctgttgcttctatatcgactgtgttttgtgtatcttgtagtttataaagctcagtcacttctaaagttccaccaggttgtacgtctttttcagagccgcccatactagcatcagctgatactgttgtttctaactgagtgccattttgaaaagcttgttgatcaatagctaccataaaagaaatgttttctttgctgttatttgtgaatttagttttaattgcgatggcattgttaccttcaaaatccttaactacttctgaactaagaatttctactttataatctccaagttcatttggatttgatttctttttcgtctccgctttagctgtttctattttttctgtacttgctttatcttctgtcccaccacatgcagttaatgctagggcaaaagtaataatccccattaataataaaatgcttttcaattttttcattttcttctctccttcatcttttatctgtttctattagaccatgtggagataataaaagtcctatgcagcaggcataggactaggaaaagatttcattataaataccataaatagatacacagacaataatataaatgacaatacccgcttttcttgtaccaggagagggtgatttaagtaaaggtaatttggaccaaataccacagaggttagtaaaaataacaaaagcaggaacgattaagaaaaagttactgaaaaaatttacggtatgagacattttaacgccctctgttggtgggctgaataaaccaaatatcaagaacatgtaaccaaatacagcgacaatcattttccaaggtgtccctgttctaaagccgggaatatgtttataccatggaataaagtcattttcgtattcgtcagctggggttttccaggccgattcggtgggggaatcatctaactcagtgaaatcggacaattcagagacatagcttgggccaagtgagtcgtttttgaccgctgtcctgaaatcttgaatggattgataacgctgttcaggatcaaaggcacctgcttgcatcgcaattttttcaagcgaagtggcgtgttctttatctggtaaagtattttttcctaatagaagttcgagcataagaacaccaatactgtatatgtccgatcgcgcgtctgtttgtgaataaccgtattgttcaggggcagcataaccgatcgtgccgaggttgacagtgtcttgatttttgcccacttcaaacatacgggaagcatcaaaatcaattaatttcaatacgccatcgctagaaatcataatgttagaaggcttaatatcacggtgaataatcgcatttgcatgtaattctgtaagtgcatcagacaacatcagcattagtcgcgtaacttcatccgtatcaaagggagcatttgttttcatcaagtcggctaaatttttcccatttatgtattcttcataaacaattaattgattgccttttggaatcatcacttcgatttttggcaaatatttactagataaatttttaagttgttcaatcacaggggcaaaactgcttggaattattttacggacaaataattctcctgtagatgtatttctcgttagcacagcagggttttctttattattgagattatctaattctttatattgttcttctataaaagcaagtgtcatttctcccatttatctaaaatcccttctacactttatagtgaaattatagcatgaagcatagtagtcgggtacttatttcgtgctataatgaaaaaaacagtcgggggtgcgccttatggatggggaaaaagagacaagtaaattacttcatgaattaaaaaaagcgaccaatttacgccaagtattagatgaaaacgaggcggaatttaaatcaagcgaaatggttacctatttaaaagaattattagcagagaaaaaattaacaaaagcaagcgtcattcgcgcggcaagactccatgaaacatatggataccaaattttcagtggggttagaaggccgtcacgcgaccggacaatcgctctttcttttggatttaaattatctggtttagaagcaagtagattattaaaatatacagaatacccacctctgtatgcaaaaaatcgacgggatgcgattattatttttgcgttagatcatggttatacgctagaccaaacgaatgattcgctctatgatctagaagaagcattaatcgaaacatataaagaagagaaaccacttatttagatttaactagaaatcgtgtataatttagggagacctaaatgattggagactagttatgttaaatgagcaaacgattttacaagcagcaacaagtgaaaaaaacgccggtgattttcctaaagtagttcaaagttttaaagaattaggcgtaactaaatatcagtttttagtcgaaaaaggcgtttatgtattttgggatgaaatggataatcaagtagaatccaagttgaatggtgtttctatgccaatctccgaagaaatttcacgcgacaaactgaaagatgcaattaaacaagcacaagcggggaaaatagattttgaaatatttattaaactagctgggctagcaggtgtcagactgtgggaagctgatttatctgcaatgaaagtaacctatatagataatacggggaatgatttggtcattgaaccgattccgagtatttaaaatgcaaaagacaatatattattgtctttttttagtacttttaaattttgaaaatatgttatgctgaaacagttgaaagaagagaggtaaagtataatggatataattacgtactttctaattgcactaagtacaagtgttgtaggaagttttttaggaataggtggaggagttatccttttgccaattctactcttgatgggtgtttcacaaggaacagcagcatttagttcggctctaactgtgttcacgatggcgatttttacgtgtagtatttattataagagaaagcaagggaatgtaggcttggcactgaaaattgccgtaactagtattccaacaacttttattggcgcaatggtgaatcaaatgttgcctgaagcagtctatcgttttctgtacggagcattaattgttgttttactagggataatgatttggaaaaagaaacggaacaatgaaaaaccacattttttaagtaaatatcgcataataccatatgtattcggtgtaattattggatttttagcgggcttatttggcatcggtggcgggccaattgtcataccaattttgctattaattttcatgttgaaccaaaaaacagcatccgcgacatcaagttatgtgacattactgacatcacttgcaagtatcggctcctatgcaatcattggtggaagtgatttttcgattgggatttacatgataccaggggcaatcatcggagcgctcattggcacaagattaaataaactcctagatgaaaaatggattgcaatattatttaatgttttacttattgccctttttgctttaaatttaattaagatttaacctcagacaagctatgaatgtagcttgtttttttgttgtccgcccttgttttatgttaagcttagagagagtaggagggtttaagatgaaaagaagttggccagattttgctgcatttttactaacaatcctaactgtaacttggataattttaacgtggggattacatatttctgacattgtacctggtggagaaaaaggcatatggtataaattaattccattatttttaggaataatttcaacaataagtgtcttttttgtgaaagaaaaactggtaaaatggattctgctaggatttaacatattattactaattttaatttattttgtgtaccatattggggaaattgggatgttttaatagggggttgatagaatggacgaaccaaccaaagcggtgatctatcaaattttatctaaaacagaagaacaaaatgcgacgatggatcatctggttttcgaaatgatgcaattccctggtgccgcagcgttcactaaaaatgaattgctgtttggcatatactggctagaaacgtatcattatatttttcgaatgagtgaaaatcaaacgacaagatattaccgaacggaaaaagggcatgaaaaattggcggagttagagcttttgaaaaacaaaagttaaaaaacgacttgatttcctgagaaatcaagtcgtttttttataaatatttagccattgtaatatcagtgttttgaaaacccactttattatataagccaatagctgtttgattatgtgcaaatacatgtagcccgattttagtaatctgcatttctttcgcaagtacatctaatgctgctaatgtttttgttccaaatcctttacctcggaatgcttcgaaaatcacaaaatcataaatgaaagcgtgtttgccggagcgggtttcgtccacatggaaccagatataaccgattttttcacctgagatgatactgtagagatattcgtttggtgtagtaattccgtcatatagcaatttgttgaaggaatcttgggattttgctaaagattcttcttcgtcccatgtaccagcctctactttttctttggcgtaatctgtaatggcggtagttaaaaaatcttctaaatcaaaagcagtcattgtttgtaaatgtaaaataaaaattcctcctcatgctttatggaaacttgcgtactgaatgaatctgcgcgacatggcaatatgaccagcctcgtttggatgaataccatcagcacagagcaaattttcataatgaaattcagcgagaaaactatcacggacatcaataatttggctactagtttcggctgcaatgcgcgaaatagtattgctatatcgttcctgccagcgataaatcatctctacatcaccgcccaaaaattgcaaaatattatctttattcagtccatctcgcgtaatgaaatcaaaataacgttttgcgtgaaggggaggtagtgtcattaaaataggtttaatatctagttttttcagtcgtgcaatcatttcgagaagttgtgtttcaaaaatgttaattggtgtgcgaggaatgtgttcagctgccggattttcagctacttccgcccagttgaaatcacaatcatttccgccaaattcaataatggcgatatcgtttgtagcatcttttgctaagtcttttgttagaatttcatggcctttagttatcgtacgacccattgtggaatgattttgaaaagtcaggccaagtttttcagatgctcgtttaatgcagttgtttttaagcaacgtatagcgatttttttcaggattgaaaagaacgcctttcataatactatcgccccaaactccaactgactgaatagttttcttcataatcatcactcctttcattaatcataccacaaaaaaagcaaaagacgcgatttgttccttaagaaaaaatcgtgcctcgcgctttttaattagttgctttgtataaatagattttccaataagattctttattatcgaatgctttttcgaactggagcccgacttctgaagcattatcaatcggaacggctgacaaaacatactcgccaccaacctttttaaaggcctctgtattaaaatctaattgtttaatgtgttttttcgaatccttgccgaaatcgtagtttttacctaattcggcagaaaatatataacaacgattaccccaattatcataataatcttctaaaacaggactcttgtctagctcaccagcaataatttttcggaaagcccttttataagcaagtggataggagttcacataaccatctacagtataaaagccactttcttgggaaacagacgggtgcagaccaatacttccgacacggtaacttgactgcggtttaccaatataatctttaatttcttccatttgctccgtggcgtaaaattgattaatgcttggcgagccatttccagtgcggtagtaaatctcagagttattagcgaaaacaacaataagttgcaacacaattgccacataagctaactttcgccaccaatttccttttttaattaaataaacaatcgcaagtgcaaacagtccataaaataaaaaaggttgtaaaaaatggaagcgcgaaaagttaaacgtccgcatgatttccacgtgttctttgattacattccaaccccgataccaccaaaacccataccaaaaagataagaataaattaaagccaaatagccataaaaatagtttttctttaacccattctcgtttgataatgattaacacaagaacgagaagcaatatcggcaaaataacatatccagccagtgcttgatcgtgcgtatgcccaaaaatgaaatttttaaaacttagacgaatcgaacttaaaaatgacaaattgggtaaactaaattcactcctcgaatctggctcagggtgcaagaacatcgcataaataaaacgataattcactatgacataaatcaaacccatgtaaagcatgctgagtaaaaatcgaatatgcacttgttttttcttgaaaacatcatacaaccaaatacatccaaccattactaaaaagaaacaaaatcctaatattaaactggaataaaatggaagcaacgtcagtatgactacattccaaattcgccgcttattattcctaatgtttaagaatgcccatagagcaagtggcattccaagcgtactcagcatgcctgatggccaaaagggtgtcagtgcaaaagctaaggaaacaaaataaattggcacgagatattttttgtctttaataaggtaatctcttgcccacaaaaataatcctaaaaatgcaaatacacgggtaattaactggctcatcgcaaaggcgattggtgtactgaaaatcatataaagccaatcaattccaacaaactctgaatcaaatgaatctcttgggacactatcatccattatttggtcaatattggctgtcccaactttcgcagtgtaatctccgctatccaaaaccattttgtaccaagtcacattagaatccaagttatcatgaatccttacatgactattcccgccaagaataaataatggagcgacataaattaccaataataatactgcaataattagccacttatgctttttccacatagttctcctccttcattatctctactatatatatgtacccgagaaaactattttcaattatatcaaaggaaaccaggtttgtttattaaaaagggtataattttaacacttgtttacacgtaatcggactttaaatatggcggaaacgtcacaattctctcttttatataggcagttttgtctgattggcttgttccagaaagccattctagctagtatgatacgtttaagaaaactattcaatgtagagcggaaaaagtctactatgagtaatttcaataattagtagcaaaaggagaattatcatgctaaaacacaactggcaaaaagtattcgttgtaatggttgcggttgcgcttatttttcaactggttccgtggtctaatatcttcgccggagcagaagaaaaccaaacaaaaacaactcaacaaatagcacaaccagatgatcaaaaagtagcggatgaaaacaaaacaaccgtaacacctgataataaagagacaactaaaaatctagtaaatggaaagcaattactaaaaggttccgttgactggaattttacaaataaagtaacagacgcaaacgggaatacaaaagaaacttatgcaccaggagactcactcaagttttcagtaagtttggcaatcccatcctattcagaagcagtcttggatgaaacttatacattttggatacaaaaagacttcttccaaggagacaaagtaacatttgttaatccagcaattgatggattaacaccgaggcaaaatgtttttacagacgactcaatgaaaaactcgattggaacaaaaacaataaatggtgtcgagtatattggttacacgctcaaatttaatcagagtccggaagctttagcaaaatatgaagatgagccgcttactaatgctaaatttgatatgtttgcaacaataagtactacaattacaacaaaagaagactataaagctattgtaattgaagatgataaagacgtagatattagtaatattgaagtccccgtgacaccaccaactcccgatacagataatggtgtactaactgcatctaaagtaattgactcggcttggcgtttagacaaagatactgggaaatatgttaaagtagctacttcatctacaaactatacacctgaaaaagatgatttagttttctattatgtttatgcaatgaacaattcaggagaaaatgccgttttagaaaaaatgatagatgaattaccagcaggcttttccattattacggaaggttcaccggaatggcaggctttatcaactgcatctggctcttcgcttcaacgcggatgggttgcctcagcagaccaaacaaatcttgcaccaggtgcaactagatacgaattaccgttttccccagctcagactatctccaaaaatggtggcggtatttatagaacgattgcagcaaaagtaactgatcctacaaaagatttgactaacgttactaaaagcccgactaaaggtggcgaaggtaaatctggttctataacgccaagtgggaaagatgtttatgacatggcaattacaacaaaaatcagctcaacctatgataaaaataataaatatattggcgctgttagtagcacaactacgcccgtttctatttcagaaggaagcacagttggcgttacttataccgcaattaatcaagggaattatacaaaagatgttgtcgtgtatgcgtatgtaccagcaggttatgaacttaataatgatacatccgatttcaaaactgctaatgataaatggaaatatgaaacaactgtgcctagtggcggtggtgtctggagtgatataaaagtatactcaattacactttctggaggtatggcatcaggtgcaacaaaaactgcaacaatgtacatgaaagctatgggcatacctgaagatgggacttatagtgctgtagatttttacatggctggagaaattggctcattttcaaactttaacggagaatctactttagacggagcaattaccgatgtggactcgacgccagacatgaatccaggaaacgatttgatcagtaatgtcgatggttccacgataaaaccaattgacggattccaaaaagaaaaaccacatgttgtaaaagaaaatgctaaatcaacagcgactttacaagatgaagatgatttcgattttgattatgtcactttcattaaaacaccagaagtaattccatcagaaggaaaagtgtttgaaaaaacacgtttatcggcagctgatgcagaaaaaacagcacgcaatatgattggtaacgacatcatgggttctgcactcaaagactatacgcctcttgcagacgatggtagaattacttcaccaaaaacatacatggtttatgaaatgaatattaacccatcaggggtagaagacacactaaattcttctttcacagatacactgccaaaagggttgaaaatgcttgaatatgatattgctggtttaaattctagcaataaacacatttatggttttacaacgaacaaatttgaaggtacaccgaaattcacaaatgcagacggacaagatgttattgtttatcaaaaaggcttatattccgagaaacaagtttgtattgccaaccctactttaaatgacgttggagtaaggtatttcggaaataacgcggataaaatgggtgtaactggttccgtaacaaaagatgcgcgtaccctaacgcttaattttggtcaaccagccgcagatccaatgtatagtgaaacaaaagcagcatacaaagtgtacatgattgtagttatcgatccagacgaaattgactacagtagcatcatgcaaaataaagcaacatacacttacaacgataaagttattacttcttatgaaaatagcgaaatgtactgggatgctggcggcggtactgcttatgcaaaaaaatatgttttagacaataaaacaaatgcatatcttagtggtagccaatataatgtagctactcctgatgcagacggtaatttatcagttggctataaaattcgagtaagaagtgcctatgaatttgataaatcttcgataaacattggagatgttattgctgcagataattttaaatctatctctaatgtggaagtaaatggttatgaggcaagtccaaacacgggcttccaaattgacggggaacttgaaaaccctgtgccacttactgcggataaatatgcagtagaagctaaagcaactgcgaacacattagatatcacaaacccagttgacattccgcaaatgcaactatataacgttcttttcaaagtgaattatcaaaaagttaaatatggcgcaaaactagttaaccaagcagcagggtcagaagttgctactgttgttccattaaacttaaatcttctaaaacaagatgatataagcaaaacagcattgacaggctatgaattcaaagcttattatgcagatgaaaatggaaaagcagatttaacgaaaccggtcaaagatacaaatagtaatgaaattgttatgacagactcttctggcgcggcaaatttcatcccgaatggctataaaacaacttctaaaaatcaagaatggaaagtagttctagttgaaacgaagacaccaactggttatgaatcaaatgaaaataaagagtatccagtgacagtgaagagcgatgcgaatggtaacttatccattccaactagcacagaaacagggcttgaaatcaccaatgatgatcacggcgcagcgacagctactattgataaccacgcagatgtaaaaatgattgatgtgaatggagcaaaaacttggacaggtgacacagcagcagatcgtccagattccatcgaagtacaacttttacaagatggtgtagcttatggtagcccgattactgttacaaaagcagatgactggaaatatgaattcaaaaatgttccagaaacaaatgcagatggaaataaatacacgtatacagttttggaaaatacagttactaactatacaagtgctgtaacaggtcttgatattaataacacattgattaaaccagatataaaaatgattaatcttgacggccaaaaaacgtggaaaaacgatacagaaaacgatcgtccagcatctattgaaattcaattgcaacaaaatggtcaagattacggtttcccagtaacggttacaaaagctaataactggaaatacgaatttaaaaacttaccagaaacaaccaatgatggagcggcatataactacacaattgtagaaaaagcagtcccaggctatgaaacaaaagtcgacggaatggatgttatcaacacgaaaatagatgcaccaaaaaccgctgtctccggtgaaaaaacatggaaaaatgacactgccaaagatcgtccagactttatcgaagtccagcttttacaaaatggacaaacttatggcgatccagtaaaagtaacgaaagaaaacgattggaaatacagctttaaagatttgcctaaagctgatgctaataaccaagattatcgttactccgttgctgaaatagcagttccaggctacaaaacaacgacagatggaatgaacttaaccaacacaaaagtaaccgatgagaaaaatgtaacttcagcgagcggcacaaaaacttgggtgggagacaatgaaaaaacacgtccagactccatcgaagtacaacttttacaaaatgggaaagcatacggaacaccaatcaaagtaacagcaaaatcgaattggaaatacagctttaccaaccttccagagaaagacaaaacaggtgaaaaatacagctataccgtatctgaaaaacaagtatctggctatagtgtaaaagtaaaaggcatggacttaacgaatacaaaagtaacaaaaacgacaccaaaagatacaccaaaagatacacattctaccaataaaccaagtaaaacgaagaaattacctggaactggtgatacgaatggtatgttgctatttgctggtggattagcactgttattcttagggttacatcttagaagaaaaagtgccaaataaagaaaacaaccgatccaagtaagcttgggtcggttttcttttgaataaagttaaaatcgggtatacagatagaaatgaaataagggggcttcatgatgaaggaagagctactgcaagcaatcgaagtcggcaagccagttttacttgtaacagcaatcgggtatattgtaggaattgtggaagcaaaaggagagcttattcgcttaaacgatgtgtatatcaattgtgtttcagctagcagagtaaatcgtttcagccgaggcttagctgtgaatatcaatcaagtcatcgggatgcaactattaagtaagtcggagaaagacgaaatgattggcggctggaaggcatacgttgcacctacagctggatgaagcgaaaacctatgatataatggggaaataataaaaacagcagttacggaggtctggaagaatgatattattagttatagatacacaaaaattaattatgacaaataatctgtataatttcgattcacttgtacccaatatagaacaattaatcgccactgctcggaaaaataaaatagaaatagtttatatacgacatgacgacggacctaatacagaacttacagaaggaaaagaaggcttcgatatttacaaaaaattccaaccaactacacacgaaagaatttttgataaaaccgtaaatagcgcttttaaaggaacaggcttacttgaatacttaaaagaaaaaggtacgaagaaaattgtagtagcagggttgcaaactgatttttgcatcgacgccacggtgaaatgtggctttgaacatggttttcacatgatcgttcccgcccatgctaattcgacggaagataaccactttatgtctggggagaatagttataagtactataatgaatggatgtggcctggccgttacgcgacctgcatatctatggaagaaacgattaaagaaatggaacataactgataaattagaaagaaattgtataaatctaccacttctttctttttttggaaacagcagcatttaaaaaaatagtaagtaatatataaaaccgattcaagaattccttgaatcggtttttctttagccaaattgcataaaagtcgtctagttggtaaatctagcaaccgttataataaaacagtgaattagttaacgttttagattgaattttagaaaaggaggtagctagacttgtagtttttgtaaaaaattatttcgtattatgtaaattgtggaagtgcttacagggcgttaacatggaattaggagcaagccttctaaatcattttatcgcaactagtataaagaggtgatagagatgttaagtggcagaatggtactaatcataaagtatttagaaggcaaaagtgagtcgagtattcgtggtatcagtaaaaagcttgaaatatctgagcggaaagttagatatgatatcgacaatataaatgacgcacttacgcttaatcaattaaaaccaattttgaaggaggggaaaggaaggttagttataccagctgatttggccaaattagcactggaggaaaaagaaacttatatttttgctccgcaggaaagaatcaacattttacagtatttgctattttttaatgttaaaaaggtgaacttggaacatttaagtaaatggatgaatgtatcgcgaacaacgattaaaaaagatttattgttaattgaagaacagttgcaaaagttgaatcttcaattggtttataaacaaggctatagattgattggtaatgaaaacgctctcttgaatgaacgtgtccggattttgcgagattacattgattttatcccaagtgaagatatagaaacaaacttttatagaaaatgtatgttaggcgagatgaaagtatcacttaaaaacattgatataaatggcgtgaataagtggtctaagcaacttttgaaacaaatgggttggattttaaatgatgaatcgtattactggtatttagcgaatattttagtcttttgctggtatataaaaaatgatgtcactaatccacttaaagatgcaaagctggtacttccaatttttaattcccaattaattcaagggatggaagtgattttagattacgagcttagtcaggagcagttaaatattctagtcggctttgtttttttcacgaacaagtatgcaagcttgaatgaagaaatggacttaattacaacagaaacgatagtaaattcgctaatcacatccatgagtgaagaacttaatttgccttttttagaagatgcgattttgtataaaggattactaaatcatgtagctccactgattgaaagagtgagagggaatgtgcaaatttacgaagatacttttgatgttattccaactgaatttctctatattttacaagcaacaagcaaggtggttaaaactataccgttacttgagagcgtcgaaaatgagagtgaaatatctttgttggcgattcattttttagcgagtattcagcgtaatcagcgtgaggagaagttgcatgtattacttgtttgtggtcttggctacggagcaattgcaatgatgaaagatacactaaatagcgagtatcaaatcgcttttgtcgcaactatccccgaatatatgttaaaagattttactgcttgggaagaggtggatttagtcattacaacagcaaaagtgacaaccccactaccaaaatcgactgtcaaagtaagcccagttttaaaagagtgtgatttagtggagttagagaagcaaggcttaaaaaagaagaatattttgactagttactttgcaattaataagcggcttagcttccttgatagcactgtgaagcagcaagttattagcgtcattaaggaagaactaggatatgggcatgttagtattccgaatcgaaagttaggattaagtgatttgattggaatagatgcgattcagattacatcagagagtttaacatggcaaactgctattcagcgagctacaaagctactatctgataatcatttcgtacttccagcttatgcggagaatatcaaacaaattcaagaagaactgggtttttattccgttaaagacgaggaatttgctttgtttcacgggaatgacagccagttagttcagatgaatagtatggctcttttgattaatgaacagccggttatgtttggggagaagcaagccaaagtcatttttattctcgccagtaaagataaaaaagagcaaattccagcaattattacactcactaaaatgacctatcaaacagattttatttctaaattagaacaagcaaaaaatccaattgatgcggatagaattataaaaaaatatgaagaggaggttagataatatgggtgtgaaaatcgacttcttgtctatttcaaacatcaatgtaaatactaaagaagatgcgattctacaattagtgaatgttttagaaaaagctgattatttggcagataaatcactttttgaacaagatattttagaacgcgaacgaacattatcgacatatattggacacgaaatcggcttgcctcatgcccaaagtagtggcgtaaaagagccttgcgtcgttgttgggaaattaagtaagcctgtgaagtggactgaagaggaagaatttgtccaaattgtatttttgatcgcggttcctagagataaccaaaataatttacatttaaaagtactatccaatctagcaagactattaatgcatgaagattttcgaacaaaattaagtaagttagacgacatcgcaacagtggcactattaaacaaaagtgtgaaggaggataactaaatgagaactcttaaatttttgcaaaagcatttgatgacagcaacttcttatatgattccatttgtcgtagctggggggatattgtttgcgctatccgttatgttgagcggacaagctgccgttcctgatgcgggctggttagcaaaactcaaccaaattggtgcagcaggcctggctctatttattccgattcttggtggttacatagcatttagtatggcagataagcctgggcttgcacctgggatgattggcgcctacttagcaaacgaaattggtgcaggatttatcggaggtattatcgctggtttcttagctggttttgtcgtaattcaattaaagaaaattaaattagcaccttcgatgagaacgttaggatccattttcatttatccattacttgggactttgattacgggtggaattatcgtcttcctcattggagagccaatatcaggttttatggattggatgacaaatgcgctaaatagcttatcaggcgcagcaaaagttccgctaggcgcacttcttggtgcgatgatttcctttgatatgggagggcctgtaaataaagtagcagcaacatttgcacaaacccaagtggatacactcccttatttaatgggtggagttggtgtagcgatttgtgtaccgccaattggtttaggcgtagcaacacttctattcccaaagaaatttactcgtgtagaaaaagattcgggaattgcagcacttttgatgggaagcgttggtataacagaaggagcaattccttttgcaacagcagatccattacgggtcatcccttcaattatggttggttcgattgtaggtaacgtttcggctttcttatttggttgtttaaatcatgcgccttggggtggtttaatcgtgttacctgtagttgataatcggattggttacattgcttctattgcgcttggggcagttgtgacggcaattatgctccgaattttgaagaaagatgctacagagcttgacgaagcactggaggaagggcaagacatagatgacttagatattaattttgaagacatttagaaaggatgataacaatgaaaatagtagcagtaacttcatgtccaagcggtgtggcacatacgtatatgtcagcagaatcactcgaactctccgcaaaaaaaatgggcgtcactattaaagtagaaacacaaggctcctctggtatcgaaaataaattaactgcaaaagaaattgaggaagcagattgtgtcattatcacaaatgatgtcgaaataagggaaagccaacgattcaaagggaaaaaagtggtcaaaatgagcgtttcagaaatcataaaaaaatcggacgcgctaattaaaaagttacaaaccatgttcgaatgaaatcagattttaggaggaaaaattaattgaaattaccaataaaaaaagcagtagaagcacttttgaaattacaaacaacaggggatagcgctacacttatcggcgttggaccaatgtctcgcaatcttttacaagcaagtttcgaattagcgaaggaagatgattatccgcttatgtttatcgctagtcgtaatcaagtagatgcagacgaacttggtggcggatatgttaatggctggaaccaatttagtttcattgatgcaattaaagaagttgctaaagaagtggattttgatgggctatattatgtttgtcgcgatcacgggggaccttggcaacgggatcaagagagaaatgatcacttaccaacagaaaaggcaatggagttaggaaaaaaatcttatatagcggatattgaagctggctttgacttattaatgattgacccaaccaaagacccttttgaagtaggaaaagttattccactggaaactgtactggaaagaacggttgatttaattgcattttgtgaggaggaacgaaaaaaacgtgggctgccagaaatcggttatgaagttggaacggaagaaacaaacggcgggctaacttcaacagaaacgtatgaaaagttcattactcaattaaaagtggaattagaaaaacgcgatttaccattaccgactttcatcgttgggcaaacagggacattaactcgtaaaaccgagcaagtaggtcactttaatttcaaaaacgcctatgatttagcgcaaatggcaaaaaaatatggtgtcggtttgaaagagcataatggcgattatcttgatgatgtaacgcttttagaacatattccatcagaaataacagcgaccaatgtagcaccacaatacggaacagaagagactcgcgcgtacttgaaactagttgagttagagcaaaaattagtagagaatggtttaatcaaaactccttctaacgcacgggaagttttactcattcaatcgattaaaagtgaacgctggcgcaaatggatgttagatggtcaaaaagatatcactatcaatgaaatcatgcaagatgatgatttatcacttgaaatcctagatatagcaggtcattacacattcaatgatgcaatggttaagaaagaaatcaacacattatatgccaatttagctgcgaataatattgatggaaaacgctttgttattgatcacatcaaacgccctatccgcaattactccgaatgttacaatttaaaaggagccacaactcgaattaaacaattagctaaataatatagagagtctaagcgttttgcttagactcttcctactttttcgatttaatggtagagtaaaaggagtgaattttgcaggaggaaatgatgattaatttaatttttgatattgatgatacagtttatgaccaactaaaaccatttgaaaacgcatttaaaactgtttttggaaaagcagaccacctgaaaatcgaaaatttatatattaaaagtcgattttatagtgatgaagtgtatcaccgcgttgtccgaggagaaatgccgaaagcagaaatgcacgtttatcggattacgcaggcactaagcgattttgattaccaaattacgaaaaaagaagcagaaacatttcaacacgcctacgaacaaaaccaacgtaaaattgaactttcaccggggattaaagaaattctcgcatgggctaaaaagaacgaaataacgatggggattattacaaacggaccaaaagaacatcaacaacataaaataaatgatttacaaatcaatgattggattccagccgagcacacttttatttctggtaaagtcggtatcgaaaaaccagacaagaaaatatttaagctagtagaagaacaaataggtattaacagcgcggaaacatattatattggtgattcttttgaaaatgatgtaattggttcaaaaagcgcgggatggaaatctatttggttgaatagacgaggacatttgagaccaacagaggcagcatttcagccagattattgtgttgaaaatgagcaacaattattcgcaattttacaggagatattttaagacctttttccattttgggaaaaggttttttagttatgaattgacactttcaattataagagatattatagagtggttaagtctttaattaagaaggtgaaaatatgaaattttccaaagcaaccaattatgcactacatacgatggtttatttagctaatttgtcaccagaaaagtctgtcggcgtgaaagaacttgcgaccaagcaaaatgtatcaccaacgtatctatctaaggtgttaacaatgttagtaaaagctggctttgttgagtcagtaacgggtgtcaatggtgggtataagttagcggaaccagcaagtagtattagttttcttgatgtcattcaagcgattgaagggaagggcgcttttttccattgtgaccctaaaaaccacagtgaaagccagccgcactgcttgattggcgaagtgatgaataaggcagagcaacaaatggaagattatttaagcaaacaaacagtaggtagtattgtcgtagaaattgaaaaacatcaacattaaaggagtgctaaaaatgaaacatcatcataatcatcacggggaagctggatttaaacggaaagtagattatttagatcggccagagcggagtgaagtgctgtcgccagaggattttttgcaggcaatgccaatcggaaaaacagcaagtattttagatttaggagcgggaacaggatttttaacaattccagctgcaaaattggttgataatacagtttttgcattagatttagatgcgaaaatgttggaattaattgagtcgaaagcgaaggaagcgggtttagctaatgtagaaacgttagaagccagcatggatgatattccacttgaggcaaattccgtggatgttgtgctcgcatcgctcgtattacatgaagcagattcgctcgcggatgttctgcgtgaagtgagtagagttgtgaaaactggcggctactttgctagtttggagtttgatacgaaaggaactgatttgaaaggcccaccaatggaaattcagatttctgcggagaaattgaaggaagaacttgcgggatttgggtttgaagtggtgaagaattggcagttggatgagggtatgtatgtgagtattgcggtgaagaagtaacagcaaaaaggttcacgtctaaaaatagcaatcaaagctatttttaagcgtgaacctttttatttctacggagaaacggggattcgaaccccggcgcggcatacaccgcctaacagatttcgagtctgtccccttcagccggacttgggtatttctccatgtatgtgtatcaatgatttgtgagccttcgccatttttttgactatcaaatcaatttcaacagattttattttagcataaaattaggaaaaagagaagctgtaaaatctttctattcttattgtaaaaagtaaggaggaatacattatgggaatatttgagaatagaagtattgtcttagatgaaaatattgttaatggtatgagtgttagatcgagggaacttaccagtgttaacagtaaatgctcctgcggtgttactagcgtatataagactgatggtttctaaatataactgggttgtcagaatacccaaagtaacatattccgtttattgattttgttagtacagaaatgacacctgctgagaacaatgattaacccctaacttaccatttagttttttttatgtaaaaaacttaaacataagcttagtgtttgccgcttgtctaatgactcagctcaattagttgaatggaatgcttatcatataaaaatttgataagaatcaataaaattaaagtttagtgaataattatactgttttattcacttggatattatgaaatatgataaaaaattaaataaggaaagaaatttcatataaaaaacaatttatattttgagtagatatgtactttttatgacggttagaaaaaggcatgcataaactgtgaataacaacttggaatgtgtgtgatattttagtttaaaacacaatgttacacaaatcgtgtaataataattctaaataagtcctgtttttagtcattcatgacaagaatcggacatttcattacttttttggttatacatgaactggacgtgttagagtatttgtaaggaggttatatggaagattctaataattagaattaatctttagtcagtaacttttgttagttcaaaataaattcagacacaaaaggagcaaaagacgatgaaaaataaaacaactaaaaaaattatttgtgggggtttggctactgttcttttatctagttcattggttttaccaacaacatctttagcatctacatctaaacaaaaggttcaagattatcaacaagaggaaactttttcagactcacctttaacagaattagacaatcttattgcagaaaaatatataacttttgacagtccactgaaacaatataaagtaaatccgtctattggtagtgaaatgacaacagaaaaaatagaggccgttaacaaacaagtggctgagacaaataatttacttactttagctacaaatgactcaagtaccaatgttatagctgtgactcctgaaggtaaagagacagtagttaaaagaggtttgttaaaaggagcgggagtgaataaagttacataccattggaattacgcacgtataagattgtcaaaaaatacagtaagaacaatgggcgttggcttaagtatagctgggatctggttgccgttgaaagtagtatcaaaagtttgtgcttctctcggtgtaggtacaggttttgttaagcacggaatttggtttgattataattatttttctaacctacttcttactggctatgggtggcagtgaattttacttggaggaattctaaatgcgaggaacacgttggttttatataagagctcttattgtaacaattatagcaatacctagtctttttatatgggatactagaactgtaatacttttcatattcttgtactttgttattcaagaagtaattttctttattattgataaaaaagatcataataagaatgataaacttagttaagattaagaactagcaaaactaataatatttatctgaaattgattgctcatatttcaccaaaattctattgcattgattatgaagatttacatgtaaaatacctcaactacggctgtttgaggtgtttttttgtgaggtatggcgtgagagtatatagctttaacgattttaaatatacttataaattttgactatcactttaatataaagtttagataattactagaaaagcataaaaaacaaacctctgaaaatagctttaaatagccggttcagaggtttatagaaatttatagaaagcgacaaaagaaaaacttttcgtccccttcagccggacttgggtatttcctcactatgacatagaatgccgacaagaagtattgtataattgtaataacgaaaatatcagcgtttttataaaaggggcgggctaaatggaaaggaaattggttcaagaaataaatttactagaaaataaaaaattggttatgaatttaaatattgtggcgattgctattgtactcatattaactgttttaggaattgtcttttcaggtggttttgcaattacgaatggttttatggggattatttggctgtttggtggttatgcagtagcaattgttattcacgaagccgtacacgggattttctttaaagcatttcgtccagaagcaaaagtgaagtttggttttaaaaatgggatggcttatgcgggaagcccgggagcattttatacgagagcacaattctttattatatcgattgcgccatttattgttcttacgggtttatttatttttctacgctttctcggggtgaatgaagcggttctatatttgatttttgcgctacatacgtctggttgtgtcggggatttctattactgtattctcttgattaatcagccggctggaatcgttgtggaggatacggataaaggcattagtttttattcagaaggttaagtttggtaacgattacaacaaagtgttagaataaggatatacttttagaaagaggtgcttggtttgaaacgaataacaattggaaatagcgctttaacagcttcagaaatttcgctaggatgtatgagaatggcggatcttagtagagaggatgcaaacaaagtaattaatacagcacttgaaaatggtattgatttttttgatcacgcggatatttatggcggcggtaaatcagaggaagtctttgctgatgcgattgatatgaatgcaacaattcgtgaaaaaatgattcttcaatcaaaatgcggaattcgtcaaggattctttgatttttcaaaagagcacattattgcttctgtggaaggtagcttgaaacgcctgaaaacagattatttagatacacttttacttcaccgtccggatacacttttcgaaccagaagaagtagctgcggctttcacagaactggaaaaaagtggaaaagtacgtcatttcggcgtaagcaatcaaaacccaggtcaaattgaactactgaaaaaatacgtagatcaagaattaatcgccaaccaactgcaatttagtattatgcatacgggcatgattgatactggttttaatgtgaatatgacaattgatccttcgcttgaccgtgatggcggcattttggagtatagtcgtttaaacaacatgactatccaagcgtggtccccgttccaatatggtttctttgaaggagttttcttagataatgacaaattccctgaattaaacaaaacaatcgacaaaatcgctgctgataaaggtgtaaccaattcagcaatcgccgttgcgtggattcagcgtcacccagcaagcttccaaacagtggttggtacaatgaatccaggaagaattgctgatattgcaaaagcttctgacgtaacacttagtcgcgaagaatggtacgaaatttaccgtgcggctggaaaccaattaccttaatggaaacagacacttgagcattttgctcaagtgtttttttgtgtattagactgatagtgaatttcattctcaattagaatataattttatcaattagtttgatatgccattagaaaagtgctataatgacaagtgagttaaggatgtatatctttatagttatttataataattattgtttaatctgtttttcgcggttgcgaaagcagatttttgtgttttttagggtaatgggaatcattatcatttggagaggatgagcataatgaaagattggatgaagcagaattggcaatttattacgacaggtattagcggaattttgattgtgattggctgtttggtcggtagtgatgttggtgacttttggacagcgattattttcctaagtgcttttgttattggtggttttgagcaagctaaagaaggtattcaagcaactattaaaacaaagaagttaaacgtggagcttttgatgattttagcggctaccggtgcatcgattattggttattggtttgaaggggccatacttatttttattttctcggttagtggggcattagaaacgtatacgacgaataaaagtaagcgcgaaatcacgaaattaatggcatttcaaccagaacgagcttttcgtttactttctaatggggatttagaggaagttgctgcaaaagagctacaactggatgatatggtcttcgttcggccgggagaaagtgttccaatcgatggagtgattgttcgcggctcaaccacattaaatgaagcagccattaatggggaatctgttccagcaacgaaaactgttggtgcggatgtgtttggtggaacggtcaatgtaagtagcgctattacggttaaagtaacacaaacatttgaaaatacgattttcagtaaaattattcgtttagtagaaactgctcaaagcgaaccgtctaaaaccgcgcgttttattgaacgatttgaggatgtttatgtaaaagcagttctattatttgtgttagtaatgatgttcttacctcattttgcactagggtggtcgtggaatgaaaccttttatcgcgcgatggttttgttaacagttgcatcaccttgtgcgctagtagcttctgtaacgcctgcgactttagcggcaatttctaacggtgcgcgtcacggtattttatttaaaggcggcgtacacttggaaaacttgcgcggtgtaaaagccattgcatttgataaaacgggaactttgacaaatggaacgcccgcactaaccgatcgactattcgccgaaaatgttgataaacagttagtaatcaatgtggttggagcgatggaacgacaatctttacatccgttagctgcggcaataacacaagacttagaaccggaaatcaccgaaaagttaacggaaatagaagtgacggatgtacctggttggggagttcaagcgatttatcgagaagggaattggcaagttggaaaggctgggtttgttgggaaagaagcagcggcagcattttcaaatggcgcatttgaacgacttgcaagtgaagggaaaacgattgtttatgtagctaaagacggcgtaattcaagccatgtttgctcttaaagatacatgtcgtcctgaagctattcgtacgatcaaagcccttcaagcaaaagggattaagactattatggtgacgggcgataatgagcagacaggtgcggcaattcaagccgaactagggatggactatgtcgtttccggttgtttacctgagaaaaaagtggatgtgttaagagaattgtcggttacttatggcagtgtggcaatggttggcgatggaattaatgatgccccggcacttgcacatgcggctgttggaattgcaatgggcgaaggtacagatatcgcaatggaaacagccgatgttgtcctaatgaaaaatgatttagaaaaaattccctacgcttacacgctttcggaacgacttcactggatcacctggcaaaatatttgttttgcgattgctgtaattcttgttttaataacggctaatgtcttccaactaatcaatttaccattcggggttgtgggacatgagggaagtactattttagttattttaaatggtcttagattgcttagatctaaccggaaaaagtgataaatttgactgcttgtctattcctagtctaagatagatgagcagtttctttttgtgaaaaaaggggtattacatgttagattggagatgagtgcatgaaaaaaatcaactggacacaatggatcgcactatttgtttttgcgtcaatggggatttctgtcgtttttactatttatgaaatttttacagcaccaataaagcagccggcaaccggaccgcatgtgacgttacgaggggattatatatttttactatttgaaattatattaggaatttttattttgttgctcccttcgattattgcacgacgcttcaaatttgaaatacctggtcttgtgtatattttgtttattgtttttctttacggctcgatttaccttggtactgttcaaaaattctactcaaccgtgccacattgggataaaattttacatacttttagtggggcgatgctcggagcgattggcttttcgttcgtcagcttactaaattctaatgacaaagtagtcatgaaacttaaaccgggctttatagctgtattcgcgttttgtttcgctgtgacaatgggggctttctgggaaatgtatgagtatacttttgatgggataatgaacttaaatatgcaacgttataacctatcaaacggaacaccactcactggccgcgccgcactggaagatacgatgacagatattattgtggatattattggcgcactgtttatcgttatcgttggctactttgcacttaaaaaaggccgaccttggatggaacgctttgaatttaaacgtaaaaattggaaaaaagaaccaaagaaaaaataagagcaaaaagcatctccgcacgtggaggtgcttttttagttgcacaaatacgccaacaaatttgggtctctgaaacaattgactggctcgtggaacttttctacacttaaaatgagaagaaaacttttgaaggagtgaggaaatgtttttagatacggggaatttagaggaaataaagaaagcgcttcaatttccgttttttgaaggtgtaaccactaatccgaccattttgttaaaggagaatagaccgagaaaaacgcatattgggagcattcaagcaaaagttgtttttgttcaagctgctgggttaacggaagaggaaatttgggaagatgtacttcgaattcaagcaattgaaccagctgaaggtacggtaattgggttaaaaattccagcccatgaagcggggatcaaagtcatcgcaaaagttcgcgctaattttcccaatgaaatcattttagcaacagcaattttctcatcggaacaaggttatattgcggcgctctctggggcagattatttagcgccatattataatcgcatggaagtaagtggattagacgcagcaaaaacaatagaagaactacgatacgtgttagatttgcaaggactagaagatgtgaaaattatgggagcaagttttaaaaatagtcgtcaaattatgcaagcattagctagtggagcagatacggttaccatcggttacgacttgtttttacaaatgatgaataaacctttagcacttgaaagtattgaaaaatttaatgagcatcatgcagctttaccaaaataagcgaaaaaagaagtatccagcaaatctggatacttcttttgtttatttatcttcgtttcgtaatggtaaattgtttacgtagctatcggaatactgtaatagttttcggctagcgtcaaagcgttttttcacatcactcgaaagttctttatttgttccatcataattcgttgctgcaccagtttcgaaactttcatctggttggtacatgtaagaattggtgaaatagcttccttctggcattgtgtagcgctcaggtacgtaattattagatgaattgaggatatcggttccaaacataatttggtcgccagttttaataccaagtaaattcataacagttggcataatatcaatttcgccaccaacatttttaatttcacctgggttttccattcctgggtaatgtaagaagaaaggaatacggtaatcatcagctggttctgctttcaattgggtggaacgattaacgtatttcttttgttcctcaggtagttggtcggttttgataatgtgatgatcgccgtagaaaaccacgacagaatcatcccaaatgccgctatcttttaatttttgaatgaattcaccaagttgtttatccgcataatgaaccgcttcaaaatagttaccaagttctgtatcttttaaatcgctcggtaagtcaatttcttgcttatctttcggaatatcaaatggcatatgactgctcacgctaattaattgcgcatagaatttttggttgtttttgtactgctcttctaaaatcggaaaagctttgttgtaaagcacttcatcactaggagagaagccgataacgtcctcatcaccaaagaatttacgatcataaaacttatcaaatcctactgcaggataaaattcatcgcgattgtaaaaactagcgtcatttgtatggaaggttgctgttttataatcatttttgccaagtaaacgaggcatagacgggattactcggtcaccgtatgtttgtgtattcgtataataaccacttgggaaagtcgatgtataaacggaccattccgcgtcagccgtatttgacttagagacagtttggaaaaattggttggaatacatggtttcgttttgtaagccatctaatgttggcgtaattgactgaccgttaattttgacgttcgttaaattacgctggaatgactcgagttgaacgatgataagatttttacctttggcagcaccgaaataatcgggattcgatttaaccgacacacctttaatatcattcacgtttttggcagtaatatctgcggctttaacatgatcagcaccagtaagcgcggtactaatattaaatgtaaaaattcccattcgttttgcgcgcttggagtcactgataatgttttgttgcatcataaaataggtaaaaccacttaaaatgagtagtgtactaataaatgatacaccgtaaacacggctagttaggcggaatgatgggaactcgtgtccttttttgatgttgaaataaaggataaatggtagcaaaataatatctaagatgtataaccagtctgtcccgctaagtaggcttgtggcactgtttttaactacgccaacctcaccgataagagagaagctgtggtatgttggaacttcattataaaaccgagcgtaaagaacgcaaacgagcataagaattccgataaacaaagacattcctgcataccaataaatgtgcgagcgaaccggtgcaaataaatgaatcagtccaagaagtaagacgataaacagcaggtccattccaagtgccaagaagttaggatctttaaaaatctggaaataggcgaaagtgaacttaccaataattagtaaaaaataaaataaaatcaactgaattcctctttctagcatgctttgtgctaaacacgcacaaatccattccttctaattttagcttaatcgtgcgtacagtgcaaatcatgaaagatgattctgatatatttgggtaataggttctactttaggaaagaatgattagtttttgtatttttcctcacaatcctattgacctttaaagtgtaaaaggatatccttttagaagaatgtaaaaaggtaggagacaaaatgaattcattatttagaagaaaaccgatagaagatttaatgcataataaaagtggtagcacgcatttaaagcaaactctcggaccacttgatttaactttacttggggtcggagcaattgttggaacagggatttttattttaccagggacagtagctgcgaaaaatgcgggaccggcgattattttttccttcgtgattgcagcgattgtttgtgcgattgcagcaatgtgctactcagagtttgcatctagtgttccggttgcagggagcgcctatacgtatggttatgtggtttttggtgagttaattggatggttgcttggttgggcacttattttggaatacgggcttgcagtggcttctgtggcaagtggatggtcttcttatttaaatgcgttactttcaggttttcatatttccatcccggaagcaatctctgggccttttaatccagaagtaggtacatttattaatttaccggcgattattattgttcttgtgattgcctttttattaacgcttgggataaaagaatcaacgcgcgtgaataccattatggtagtaattaaagtcggtgttattttacttttcttagtagttggcgtattttatgtcaaaccggataattggcaaccgtttatgccgtttggaattagtggagttatgaatggcgcggcgctagttttctttgcttatttaggttttgatgccgtttcctccgcggcggaagaagtgaaagatccgcaacggacgatgccgattggaattattgggtcgctacttatttgtacggtgttatatgttgctgtatccgctgttttaactggaatggtgccgtacacagatttaaacgtaactgatcctgtggcttatgccttgcaagtgattaaccaagattgggtagctggcattgtatcacttggcgcagttgttgggatgattacggttattttagtgatgagctacggggctactagactgatttttgcaatgggacgtgatggtttattgccgaaagtacttgcggaaatcaatcaaaaataccaaacacctgttaaaaatacttggattttcgcagtgattgttgcaattattagtgggcttgtgccattggatcgattggctgagttggttaatattggaacactcttggcgtttatgatggtgtctatcgggattatctttttacgtaaaaataaagatattcaagcgagaggatttaaagtaccactttacccagtacttcctattgtttcgttcctattatgtgcgtttttaattagccgtttgtctgttcatacgtggattctttgcggaatttggtttgttattggtttaattgtttactttgcttatggtagaaaacatagtgaattacttaaaaaataattaacttactttttgtaagtcgttttattggaatttgaacgctccttatgttgtaatgaatgtattacaataaaaggagcgttttttacatggcagaaattagtgaagagttacgacttggcgaagttgtattgaatgttggacatttaaaagagatggcaggcttttatcaagaagtaattggtttgaagttattagaggaaaatgagcgaatggttcggctcggcgtgagtgggtctgatgaagctttacttgttcttaaaaagatagataatgcggtcgttccagaagtgccgcggattggcttgtttcataccgcctttcttctaccaacgcgagaaagtttagcggatgtgttacttcatttagctaagtcaggttatccgattgatggcgcgggagatcatgcttatagtgaggcgctttatttacatgatattgaaggtaatggcattgaaatttatgcggaccgtccaaaagcggaatggatgcgtgatagcgatggtaatttaccaatggtcacagaacaagtagatgtggattcgttgcttcaaattgcgacagacgaaccgtttacaggaatgccaaacggaacgattattggtcatgtgcatttacaagtggcagatgctgataaagcggaacaattttataaagaggcgcttggaatgaagttaacgaccgctattccctcagcaaggttttttgcggctggtgattatcaccatcacatcggttcaaacgtctgggcaggtcgcaacttggaacttctgcaagaaaatgaaacaggactagcttggtttacaattattacccctgataaagatgcaataataaccaccttagaagaacaaggatatgatgtgaaacgatttgaaagtaccatttcagtgacagattctaacggaattaagattcactttaaataaaaaaagaactgtttaagcgaaaaatgagcttaaacagttttttgatgcgataataagggaaaggtagattagactaattattttaatgtttacgttgcattgttttcttgaaaagccaattgctagattggaaaagcgttaaagcaattaaaactacgccaattccaagatttaaatacgaaagggctacggctgcgttatctggaaatgaattttgcacagtgatgaaaataataaagaaaccgctgtttgcacaaaacgcaatccaaaaccaagataatccactaagtttaccaactacaaaagaaagtcctgagattattgctgctaaaacaattcctgtaactatcatagacataaattccattttcatcgctcctttgtcataaatgaattattattaataataatgtaacataaatgaaatattttgtaaagaagatacgaagaagggagatatctagatgattgaattttttaagacaacaaatgaaaaaatggagcaactttctgctttggaagatggttgttgggtaaaagtaactgctccaacagacgatgaaatagaaatgttaagtaaggaaatggatgtgcccaaaccgtatattttggatgcactagattctgaggagcgttctaggatagaattgaaacgagcagagcaagatgtgagacattcactagtcattgttgattatccatacgaatcggaggatgaactaggctacgcaatgtatgaaacacttccgattggaattgttttgactagaaaacatcttgtgacaataacattgcgagacttgccaattttaaaagatgtgcaatcgatgaagttagaagaatatgatacaactaatcataagcaatttttgttaaaattattgtatgctgtatcttattattacctcaaatacttaaatcaaatcatcaaacaaacaaataatttagaaatacagattaaacaatcgatgaaaaacgagcaactgtatgcttttatggcggttcagaaaagtttagtattttttgcaacagcacttcaatcgaacaaagccattcttgataaaatggaagatgtagaacattttatgcagcaagaggataatcatgatttgctcagagatgttattattgaaaataagcaagcaattgccatgacggatacatatacccaaataattagcgggatgtcggatgtattttcttcggttatttcgaacaatttaaatatcgtgatgaagtttttaacatcatttaccattattttgtcattaccaacgattgtggcgagtatttatgggatgaatattaagctaccgtttatgcataatgagcacgcgtttgcattaattcttttatttacgctattaattacaacgggagtaaccgtgattttttggcgtagaaaatacttttaatatatagaaaacgagggatgagcatggaaaaacaaacatacgaaaaattagcatattatacaatcaaagaaaaaattctcagtggaaagcttcatgtagggcaacatatttcagaagctggtattgcaaaagaattatctattagtcgaacgccagtcagaaaagcaattgcggttttagtatccgaagagttaatcgaatacgagctaaaccggggggcaattgtgattgaaagcagcatgagtgctgggcgttttattgaattattagaaatggccgaaatccttgtcgtacaaacgattgaaaaatgtaaaaataaaaatttaacttataaaccagagcaaggtaatgcgctattagaggaaatgcgcgaaattcaaaaagaagaagatgtagaggcttatttgtccttacttagcaaatggttgttacaatttgtggcgcagttggctaatagttatgccgaggatattgtcaggaaaatgaagcgtgatttttttaataaagcgcaaaaagatattaaaataattcctgtgctcttggaagaagaaacgatggaaacgttagaacaattaacttactacatggtagaaaagaaacatgatttagcaaaagaggtaatacaaaaattagtgaatttgtatattatccgtacatttagatagtatttctaaaggtgaattgcttaaaaacaggaggtgcttttgatgcggaaagtatacgaaatatttattttagactggcgccgtctctttaaagcgcctttagctttattattagtaattgcattaattattttgccatcactatatgcttggtttaatattgaagcactttgggatccgtactccaacacttcggggatcaaagtggcagtttcgattgatgatgaaggcgcggaaatagacgtaccagggaaaaagccccaacaagtgaacgtcgggaaccagctcaagaaaacgctagaaaaaaataaaaaacttggttggacttttgtaagtgaggatgaagcgaaaaaaggcgtgaaaagtggaaaatactatgcgtctattcatattccaaaagatttttcagaagatatggtttcggtcgtcaatgataatgttaccaaaccgacaatcgattattccgtcaatgaaaaaatcaatgctatcgccccaaaaatgacggagagcggtgcaacgacgattgttaatcaaattagctctgagtttgttggtacagttagtaaagccgttttggaagagtttaataaagcagggattgatcttgaaaatgaattgccaacaattcgtcgattaaaaaccaaggtattccaagtgcaagacgctttaccagaactgaaaaaaatgggagcagaagcggtcaaaatagaagccaaactgcctgaactgaaagcgaaagcaaaccaagttgtcgagctaaacgaaaaaattcctgaactaaataaagcgacagaaaacgtcttattagtggaacaacaactaccaaaaattgaccaactcgggcaagacattttagtgctacaaaagaaaattcctgaaatcaaacaaatcgccgaatcggtaaaagaagtagatgaaaacttcggaacgattaagaaaacggtcaatgacgcagtgaatgaatcgggcaaagcgcttgatgtgattgatactgcgatggcggcaattcccacagtagaaaaaattgctcaaaatggcagtggctatgtagataaagtgtctgatttcgcagatgaaattaataagtccttcgatacgttagcgcctgcaattaaacaaaacttaacactaatgaagcaaatggcagacaatatttatcaagtcacagaagcaattaaaaatggctcaatcactccagaacaagccattacggaattgaagaaaatggagcaagatattgattccttgcagcaaatgattacaaaacaaaccgcgacattagaaagtttaaatgaaacattgccgaataagccatttaccgatttaattgcgaatttaaaaacgattaatagccagctaggcgcgcaaaaagaaacaattacaaaagtacgcacagaacttgaaaatggcgcgcaaccgtccgaggaacttttaaatcaactgaatgaacaagcgaaaaatgttagcgagaaattggaccaaattttagccaactatgattcggaaatcgtcccagcaatcaaagtcggcttaaatcaaattcaaggagatttgaaagatagtcaaaaactactggaaacgttacaagcaaaaatcccagaaattacgcaggttttaaaagattccagagaaacactacagacagggcaaacctacttagaagaattccaagaacggctaccagaaattcaaaaaacgttagatgaagcaacgaaagtaatcaacactaaactggacacgattatcgcgggtattaacgaagcggccaacttttaccaaaacgattatcctaatgtaaaagccaatattaaaaaagcggccaacttcattcgcgatgatttaccagggctcgaaaaagaaataaaccaagcttcgggcctcatccaagaaaaaatgccagaattcgaaaaagcgattaaaattgcggccgatctttcgcgggaagaattgccagaatttgaaaaagccattaataatgcagcgaataaaattaccgacttcgataaaaattacgatttgcaaagtattattaaaatgcttagaaacgacgcagataaagatagttcgtttattgctagtccagttaagttaaaagaaacaagctactatccaattccaaattacggttcggcaagttcaccattttatacggctctttgtttatgggtgggtgcgctcttgttgatttccttattacgtgtggatgtagaagtgccagctgggattttcagtcattaccatcgttattttggacgattactgacattcttatctatcggattaatgcaggcgcttatagtgacgctcgggaatattttcttgctcggggtatccatcgcagaaccattactacatgtactattcagcatgtttatcagcgtcgtatttatgaccatcgtctacacgctcgtatcactatttaataatgtcggaaaagggattgcgattatcctgttagttttacaaatttcaggagcaggcgggaactttccaattcaagtttcgccgccatttttccaagcgatttatccattcttgccattcacttatgccgtgagtttaattcgggaaagtgttggcgggctttatatgccaactgtttggatcgatatgagtgttcttgccggatttgccattctctttatcacgctaggcattttactcaaaaaaccactagataaagtagtacccaagctatcagaaaaagcaaaacgaagcaagctcatccattaatattttttctgtgatataattacgagcatagagggggcagactttgtggcaaacaaatttaaaacattagataaaatggtttataacttacttcttgaaaaaattaaaaacggtgagttagtgccgaatgagcatttagcagaagaaaagttggctagagaattcggtgttagccgctcaccactcagaaaagccattgcaacgcttactgctcaaggcattgtcagttatcacgaaaatagcggtgctgttttaaatgattgtattgttgatgcggatcgttatgtgcaattgatggaaaccattgaaatttttgttgatgcagcgattgcgaaagcagcccattttggttatgaaatggatttagagaaattgtatgctcgcatgcaagagatggagcgcttttcgtatctaactgatttagaaaattatttcgatgcgcatcatcgttttattctttgcttaattagttttgccgaaaatccctatcaagtgcgtatcgtcaagcaaattttctttcaaatggttcatttttcagatggaattaatatgtttaaatccgttgaaattagagaatggactaacaaaaagagcaatcaaatttatgagttgcttgcagaaggaaaaatagaattggccaggaaaacgattaagtccatgtttgcagaactaacgattcaagcatacagataaaaaagctgtcacttttgtggcagctttttttgatataaatgaaacccgtttttcgtgcccaaaaactgaaaaccataacggagatacatttgattgagcgttttattactttcaatgcaatctaaccgaatgaacggcacggacatttcaatccctagtttttccgcaaaataaatcatttgcttacttaatgaaattccggaaaactctcgagaaaccataatacggtgcaaataataggctttatcaattgccaaattatcccacaaatctgtatcccaatcactaggcgttttccgaattatcattgtcccagcaagtttacccgcttccgtttcaaaaagggcaacttcaccaagttcaatacgttgttcgatattatggacatcaaaaccatgcaaaatgtcgctccactgggttgaacccgattcttttaaccagcgagctgtatccatcattaagccatttattttgaggcgatccgttggcaaagcaaagcggactagaaattccagtccgccagccgtgattttattttggttcattgttatcttttggagcttctggtgtttcaggagcttccggtactactggagtttcgggttcttttgctgcatctggtccaaagccttctggatgtgtatcctctgcaaatggatcagcttctgttgctccaaatggatttacttcttcttccacgattaccgtttcttctgtaaaagtaccttctgttgctgcgtataaatcatcgtagaacacagcgatagaagtgattagataaggataaacataaagtgaaataccaagtgtgattaaccaggaagctagaattaaaacgagtccgccaaaagtagcgccagcagcaagagctgaaattacttcagcaggatcagctgtataagatgtagtagccattcccccagcaacgataaccgtacctgcaatcgctacagcaagaggaattaaataccatagaaggaatgtaagagatagtccaaaaagtctacctttatgtccattcatcatgtggcggctttctgtaatagcatctagcgcggaaatgttaggattatctcttaagataaagaatgtttgtgaataagagtaagttttaataattcctggtacgattaagagtaagctccataagaatgtgaaaatggaaataagcaagtaagctaaaaatgtacgtccaaattgtttaaaaccactaaacatataagcaacatctggttgttcacggcgactgattgccaggtacacccaagcaactccagtataaagtggtccagttagcaggaatagtgcaatccacccaacgactggaatccaaccaagtactcctccgccaacagtttcgattaaccaagcaagcacaaatattccaatggcaattccccagttgccacgaagcgactcttttgctgtctgttttacttgtgaaatagtcatcatagtaaaaactcctttttcatttattttaagtataatagcaaaaatacctacctttaaaatagcacattttcaaggactaatacagtaataagaggtgttacaaaaaaaagctaaaaaaaggattacatttctatttattggggaaaagtagaattatgtagtatgattaatttggaggtggcgcgtatggcccatgagaatttaagagaactagaagatcaattgattgagttgcgacaaacatatcaagaggtaatcagcgaaacaagagagtttgaagacccacaactccaaaatggaccaattaatgcagcggaagttagattaagtgcattacgtcacgaaattgccgaagtagagaagaaaatcaaaaaagcagaaagcaaaaccgaataagaaaaaagcgtccatttgttcattttgcagaggggcgtttcttttacgtagatttggaggtataagcatgaagccaatttttgctgtaggagatgtacacggagagattacgcttttagacgaattactcgaaaactgggataaagagcgagaacggcttttgtttgtaggagatttgattgaccgcggcgaaaacccagctgcagtacttagaagagtgaaagcattagctgaccaaacaggagccattgtcttaaaaggaaaccacgaacaaatgctactagattttctcgaaaatccttctgggaaaatgcattattatttaagtcaaggtggaatggaaacgattcaatctttaatcgcggactctttagataaaaaaatgacgccggagggattagcaaagcgggtaaaagaagaagcttctgaactcattgatttcattcggaaattgccgctctattatgaagaaggcaaatatgtatttgtgcatgcaggtgtagatttgacgaaaaaagattggcatgatactgaggagcgtgattttttctggattcgcgaacctttcttatttggacagaataaaacggggaaagtctttattttcggacataccccggtacaaaatttacatattgatgaaagttctggtatttgggtttcggaagataaaacgagacttgatattgatggtggtgcggtttttggcggagaacttcacggagtagtcgttgaagaaaaagtcatcacaaaaagtttttctgtaaaaaaataagcatcgaatgagctcttaataagcgctcatttgatgcttttttttaataatacggtgccataaataagtatactagtacgccagttaaactgacatatagccaaatcggcatggtccagcgaacgatttttttgtgtttctcaatttgcatcgtccagccccaaacaagtgcaaatagcgctagtggaacaacgattgctgctaagaaactatgtgtaattaaaatgaaaaagtagattgggcggataattccagttccgccaaatgtagaagtttctgctgaaaggtaatggaaagttaagtaagatactaagaagaaaagcgttgatgtaaatgctgctaaaatgaaaccacggtgcattttaatgtttttcttttttataattgcccaaagtgcaataactaaaaatacaaaggtaaaactattaaagatggcgttcatacgcgggaaaatagtaatgtcgaaatgcactgccccttgatatccaatgggtgagaagaagagtagcaaaatcaccacaaccgcgacaaatgatataatcattatcggccaaaaatagtttttttctgatgtcggctttgtgagtttttctttattttgttccatgaaaaaaatagccccctaaatataaaaattgctgtacttctttcattatacatgacgaacataacggatgcgaaagattgagcttttaaggtataatggttggggaaagggtgtttcttatgtcgattattgcacgagaactaacgaaagcggaagaagctgaaattatccgtttaaaagaagaaggcgaagtaatgctccaaacggacggaactccagaagagcgcatcgagaaaattactgagtacttaaaaaatacctcgccagaccctgatttagcagaagaactaggttatattttaggatctttgtacggagaggcagtacgtgaaaagtatggatggcgctggctgtttgtctctgaaaatgatttagaagggtatgcggttacgtcgaaagagcatggctatacatttatggtgcatgattattttatgcaagtaatcgttcagaataagccagataatagtaaaatgctatttgaattgatggttgatatgactgggaatcgaaatgattttcggatgattgggtaaggagaataactaggaataactgtttttgattccttttcgaggtgatgcaaggtgaatgtagacgaacaaaaagtccgggttttaaataatttagtggagcattatggttatcaagattggtgggaagcggataatcgtcttgctgattggctttcgatgatattaatccagcgtacgatagagaaaaatgccaaacaagcattagcgaaccttggaccgcatttagatttagaaagtttaattggaatggatatggcgacattagaagaatacatctatccggctggcttttataaacaaaaaagtatctatattaaagctcttatcaagtggttccatggccacggagctagtttagataagttccagacttattcaacagaagatttacgaaaagagttattaggcataaaaggtgtcggggaagaaacggcggatgcgatgttgctgtatatttttgagcggaatgtgtttattgctgatttatatgccagacgactattttcgcgattaggttttggcgaatataaaacctatgaacaaatgcgtgaagagtttatgccgattacagagaatatcccgcataaattatgcaaagaatggcattcggtcattgatgttcacgggaagcatttcggtaaagataaagcgatggatgaatcgtggttgctcgaatttagtaattaagtatatctataccttctaattgaataaactggtccaacaagatttcatacaaataagcaatttcttcaaaatgaaggtcattcatcaattgaatggctttttttgcttgtgcgtacccttctttaatttgattgctttgcattttaagtaaaccttttaaaaaattcgagatgtttcggtagaaagcactctcattatagatacataaggaatctaacaggatgaggagtttacttgcagaggatagttgactgcgggaaataaatacttcaatcgtattaattaaaagggtacataaaacgcgccttgctcggtcataatttttataaggttgaatcgctttaattacttgattcaaaaattgaatttgtagatcttcttcaaaaaaataaatagagttagcgcaaatcttaagttcttctagcgtccacgtatcaatcgaaaataaatatttttgaatggtacatttatcttttgcagtaatgacatccactgtgaattcatgatatttaagcaaatgttcaaccatttttattctcgagcggacaaatgctttccatacttcaactaattctccatcatgtttagaaagttcgctgtataatagctccaaactctctaaatcataaatatttcctcgttcttggttcatgcacaaataatttttttccgcggatttagaaagttctcgatggatataaaaaaattcatctaaatccatattcattcgttttaatattttttcaaacaaacttaatgtgatatcgtgttttcctttttcaaattcgatggcgaaggatttggaaatgatattatcgtataaatctttttgatgtattccttttgaagtacgtatatctctcactgttttaccatacccaatcattcaagttactccttttgattcataatttaaatgagggctgcatctaaggggtttgcaaggagtgtaacagccatttttccttttaaatcgtagcatagaaaatttggcggaagaagtcctatttttaggactttatgaaaaaatgatggaaaagcttggtatattaggagtggagaacagattcgtttacatctttttaggatatttaactatagaaagaaggaagttttatggctaaagcaaaatatgaggaaaatttcaaaaaaagtttagttgctttatatcgcagaggaaaaacgaagcatagcatctgccaggaatttaacgtccctcactccacttttgggaaatggattaaaaagttcaacaatgaggaaaatattgagtcgaacgagattttgaatatattgcaagcgcaagaactaaaaaagcaacgtgtgttattagaagaagaattgtctattttaacggaagcgattgctgtttttgagaatccgttgcctaaaaataaataatttagtgagtaatagagaaaaaaccttaagcactagcttaaggttttttgcaaattattcttcatcaaaggcatctaaggcaataggtaaagcgcttattaccgtgttcccaacagcaggtaagccgacgagaatggcgctaatgatttcatcgcgagttgcaccgtttgatttcgccattttcacatggaaagggagtccgctttctaggcgagtggcggccatgacagcaatgtacgctagttcttctgtttttttatcgagtttacttgcggcatctagtttatgtacggtttccatccaggcagagtgtacttcgggagcttctttcgcgaatacttcaaatgatttgcttactttcattgaactcatctcctaacttttattataataaaaaaccgcccaaacactgggcggttttcgtattatctattttctgctttattataagcgccatgccaaacaggaccgatgaattcgtttagtgcaaatccacctttgatagctgctgtgacaaagtcttttgcttttgcgacagcttcttcaacagttaaaccttttgcaagtccagctgtgattgctgctgcgaaagtacaaccagcgccgtgattgtggcttggagagatcttttccacttcatagatagtgaattctttgccatcataaagtaggtcgattgctttatcgctttctagggcttttccgcctttgataacaacgtatttagcgcctagttcgatgatttttttcgctgctgctttcatatcatctaaagtagttaatttgccaaggccggacaattggcctgcttcgaataagtttggtgtcgtgattgttgcttttggtaatagtaagtcgcggatagcttccgcgttttctggttggattaattcgtcttcgcctttacaaaccataactgggtcgattacgacattttttaaatcgtatttgtcgatggcttcgcgtgttgctttaatgatttcaattgaaccaagcatacctgttttcattgcgtcaactgggccgccagaaagaattgtttttagttgttcacgaacaagttgcgcatcaattggagtaacaccgtgcgcccagttgttgtctgggtccattgttacaattgttgtgatcgcgctaaaaccgtatgtgccatattcttcaaacgtttttaagtctgcttgtaaaccagcaccaccacttgaatcagaacctgcaatagttaatgtttttttgattgtcattcgtgtttcctcctataaataaactttagtcatttgtttctaacattttatagatggctgctgcaacgccgtgctcatcattcgaaagagttacgtgttctgcaaggtctttgacttcttcttcgccgttacccatagctacactgtaaccagccatttttagcatcgaaatatcattcatattatctccaattgcaaaagtttcatcaagtgttacgcctaatttttctacgtaatattgtaaagaaatacctttttgtgcttcgcggtgggtgatttcaatattatcggagaaagaagatgttacggatagttccgaatctttttctagtttttgtttggcttttgcaagaatgtctttatcagaagagaaggaaatgaattttagaatggttaaatctttattgcctaaaatacgctctacatcaggaatttcgtgaacgtccttggattcaaaacgttcttctactttatccataatggtttctgcgggaacgtctgggtggatgcgtttgtgcatttcaatcataaattctttgccacgagctttatctgttgtgattgggcccatatcagtgaaaaattcggtatacatacctaattcagtcagcgtgttgtaagtgtttcttgctaggtttctatcgatcggatgttgcaaaatgattttgccgtgttcgtcacgaatttccgcaccattcatacaaattgctggtgcatataaattagctttattaattaaccccattgcatcgtcatacatacgtccggtgcaaagaacgaaatgaattcctttggcgcgggctttttcgattgcctcgacgttttcttgtgcaatctcgatatcagagttaagtagtgtgccatccatgtctgaagcaataactttaatcataatattaaattcctccccaattttacctacttcactagaatatcatttttttaagaaaaatgcacaaaaggtagctgcgcgtagttttttaggtggagcgattactttactatatttctgtgattcatttggttataatggataagaataaaacgtggataggatgtgtcaggatgaaaacagaactagaaaagatgattgcaggagaaatgtatgatcctagcgacagagagcttgcacacggaagaaatcgtgcgcgtaagttctgcagagagattaacgatgcgatggattcagagtcccgtgcaagcgtgctgaagcgtctattcggcggaacgaaagaaaatgtttatgtggaacctgatttccgtgtcgattacggttctaatatttatgtaggcgaaaatttttacgctaattttgattgtgttattttagatgtttgcgaagtacatattggcgacaactgcatgatggcgccgggtgttcatatctatactgcgacacatccgcttgatccagtagaacgtaatagtggattagagcttggtaaaccagttgaaattggcgacaatgtttggattggtggacgagcaattattaatccaggcgtaaaacttggaaataatgttgtcgttgcttcaggtgcggttgtcacgaaaagtttcccggataatgtcgttgttgcgggtaacccagcgcgcgttattaaaacaattgaggttgaggaaaaatgattatttcagattcaaaaatttttgaacaaatggaaaacgaattagcgaaagcaaaagcagcaaccacaaaagcgagccaagataagcatttgcatggtttgatgctgcttgttcaacttgcaaaaacaggcgatgagacaactgcggctgtagaaccgattgctattcagccaacagaaccggcgcaaatcgcaagtatggacggtaagaaaatagagttagaagacggcgcgaatggagactcgttgcttgatttttagggggtaactatgaaaaaaacaataattactggagccatttttgcagggctggcagttttactgggagcttttggggcacatgctttaaaagatgtgcttggcagttatgcgagcacttgggaaactggcgttcagtaccaaatgtttcacgcaggaggcattttagttatagggctattgatggaaaaacaagctagtcggctttacacttgggcagccattttatttgcaactggaattgtctttttctcgggtagtttgtatgttttaagtatttcgaaagtatccattttaggtgcgattacgcctatcggtggcgtttgctttgtcgttggttggttcttgctgattttaggagtatcaagaagaacgatgagtagatattaaatcaaaataatcgtcttttcgcgttcatttcagtgaaaagacgattattttttcttattggcgaataagtgctaaaataaaggaatcataatttataaggagacagcaattacatgacttatgcacttgaaataaaagggttaagaaaaatttattccactggggtcgaagcgttgcgcggtgtggatttaacggtagaagaaggagatttttatgcactgcttggtcctaatggtgccgggaaatcaacgacgattggtattattacttcactagttaataaaacatctggtcaagtaagcgtatttggctatgatctcgatacagatattgtccgggcaaaacagcaaatcggtcttgttccacaagagtttaactttaatccgttcgaaacggttcagcaaatcgttgttaatcaagctgggtattacggtgtttctcgtaaggaagccatcaagcgtagcgaaaaatatttaaagcaatcgaatttgtgggagaagcgtagtgaacgcgcgcggatgctctcgggagggatgaaacgccgcttgatgattgcgcgtgctctgatgcatgaacccaagttgcttattttagatgaaccaactgctggggtggatattgaacttagacgtgagatgtggacgtttttaagagagttgaatgaaagcggtacgacaattattttgacgacgcattatttagaagaagcagagatgctctgtcgtaatatcggtattattcaatctggggagttgattgaaaataccagcatgaaatcactactttctaaattgcaatttgaaacgtttatttttgatttagaaccgtatgaagaagctttcgaaattacgggttataatcatgtgtttgaagataagcaaaccttgtctgtcgaagtggaacgtaatcaaggagtgaatcatatctttgagcaactaagcgaacatggcattaaagtactttcgatgcgtaataaatctaatcgactcgaagaactatttttaaaaattaccgaagaaaaacatcaagtgggggagaaacatgtttaatctatattatacagctttaaaaagtttagcggcgaaagaaaccaaccgctatatgcgaatttgggtgcagacactcgtgccgccagttattacgacttcgctatattttattattttcggaaaaatgattggtagccgcattggcgatatgaatggcttttcttacatggagtacattgtgccggggctgattatgatgtccgtcattactagttcttatgccaatgtatcttcgtcctttttctcgcaaaagtttcagaaaaacattgaagaaatacttgtcgcgccggtgccaacgcatattattatttggggctttttgattggtgggattggtagaagtgttttagtcggagcacttgttacgcttatttcgatggtgtttgtgccgattcacattcattcgtggacgattggtattattaccttcttaatgacggcgattttattttcacttgcgggacttattaacgggattttcgctagatcatttgacgatgtatccattgtcccaacttttgtcttacaaccgttaacgtatctaggtggcgtattttacgcgatttcgatgttaccgccaatctggcaagcgatttctaaagtgaacccgattgtctatatgatttccggattccgctatggtttcctaggcgttacagatgtaccagtagtaatttctctatccattcttgttgtatttagtgtcgttctttactcgatttgttggtatttaatcagtaaaggacgaggacttcgaagttaatagcgattttttcaaaaagagagcggatttccgttctctttttttcatgtttactacaattctttttcaatttgatgttaaacgttttagcgtaaaacaggagggaagacataaagtaatggggggatgaaaatgggaaataaaaaagtgaaacgaaaacttggcgctaatatttggtggatacttatattggccattttaataattttcgtagcctacttagtcatgggttacgttgcaaaaatataggaggttttatgatgaataaagaaaatccattaaataaataccatacaggaaaatttgaaaagcaacgccaggattatcctggtttgcaaagtaaaatgacgcctgttccagatacaggtgaatcaagctatcaaggcgctaataaattaaccgggaaaaaagcctttgtaacagggggagactccggaattggtcgggctgcggttattgcctatgctagagaaggtgctgatgtcgcgataaattatcatccggatgaagaagtagatgcacaggaagttaaagcgattgttgaggaggctggacagaaatgtgtcttattaccaggtgatttacgaaaagaaggtttagcgaaagatttagtaaaaaaagcatataacgagttaggtggactagatattctagtgctaaatgctggactacaacaatatcaattagatattcaaaaacttccagctgaacagctacgtgatacatttgaagtgaacgttttctccgttgtgttcgccattcaagaagcacttaattacttaaaagcaggagcaagtatcattttaacgtcctccattcaaggcgttaaaccaagcgctcaccttgttgactatgcaatgacaaaaagtagtttaatttcgcttactaaaagtttagcggcacaactaggtgaaaaaggtattcgcataaacgcagttgcaccaggtccaatttggacggcgctacaaatttctgggggacaaccacaagatagtattccagaatttggtcaagatcaaccacttggacgagcaggtcaaccagcggaactcgcgagcgcttatgtgctactagcatcagatgaagcaagttatacaacgggccaagtatacggaattactggtggagctcctattaattaaaagcgaggtgaaagttcgtgccgtggacaaaaaacgattatccggattcgtggaaaaatctaaagaaaacagaacgagaaaaagctattgaaatcggcaatgcgctattaaaagatggctattcagaaagccgcgccatcccaattgccacttcgaaagcggaagaatggtataaaaatcataaggaatcataacggtaagctaaaataacacttggaacgctaggctttaagtctgctgtttcaagtgttttaattttgataaaaaaagtgtactatttaaattaagagagatgcttgccaactaggaggaactttttatgaataaaagaagatggattttcagcactgtggttacagctttcctattgattatcggaggatttttagtttatcaacagatgataccaaaaccattcaccgaagtagtggcagaagctaaaatcgacggttatgagagtggggatgaattagaaaacgctagtactgtcatcgtaacaggtcaactagaaaaacgcggagattcaataatagagcgagcttcagatgatgctgtgataggtgtatatagaatgtccacttttaaaatagcccaagttttaaaaaacgaaacggacgacaacttagcaaaagaaatgacaatacctatttatgaaaatgaaggttacgatgccaaaacgaatacgacataccatatcgctggctatacaaaaatggaaaaagaagaaaaatatctgttgttgttgcaaaaagattcagaagatgactattatatcccgacagcggttattttcggaaaaattaatctcgatcctaataaaagaaatgaattatttcctaaaaacagcgatacagaagtagcaatcaataaagtacaagccgaagttttaaaaaatcttgaaaaggaaatcgaccgagaggataaataattatgttctgttgcattttagttaaattcgtcatctaattttaatactaaaaaagggtttggattgggtgagacgggtattatataaccataagcaatgacaatgccattactttttctcccttttttgtagtgggttgtctttacttaccttaaactcccttttatactcttttgtggttgtgtagcaaccctttggagtatttttttggaaaaaatgctaaatataagaaaactcctcaaacaagggaaagttcgaggagttcggcatttaccaatatttataaatgccactggggattttctaagtgaacaaagatatggatgtttgggaaagcatccactttgagaatttaccatagatagctggcgttaagttgtaatgtagtataaatcatacaattcttgtagtacatcatatatagcactgaattaccaaattcctgataaataaggaaagggtggaataaaagtatctcatcaggtatatttaaattacacggtagttaaggaggtaacgataagttgagtaattttaacatcatgggatctttaatgcttatagctgttttagttttagcagtgtatgttattaccaaagttattaacaaattaaaaaaataagtagagtttaactaaaatacctcaataacattttggggtattttatattttagtgattatttctcgcaatcatcaacggatggattttatgtaaagttttattgttgatatgtattcataggctatcgttttgatgtctaataggtttaaaggcctgtgaaaataggcgcattttattttaaaaatagaaatgtgtctattttatgaatctttattgtaattgcttgtgtaatgggatggctacatatatccttatagatacggtgaaatttatttacataggaggaaatatgggatttttagaagcttacaaatcattttggagaaattacgttaactttagtggcagagccccgagatcggcgtattggtatgtagtactttggaatgtaattatttttgtaatactttatgctttagcttttatttttggtatttcagctattatggaagcagctatgggtggtacaggaatggctggcggtggcggtgcaatcgttctggtaatcattttatggctatacttgctagcggctttacttccaacaatcagcttaatggttcgacgcttacatgattctggcaaaagtggatttttcgtgcttttaagccttattccatttgctggcggaattattatgttaatttttatgtgtcttgaaagtgatggaccaaaccaatatggtgatggggatatagatagtaaatttgatttttaaataaaaaacgagctaggagataatcctagctcgtttttttaatggattccttcgcttacaaggaaccaattcacttggttggtattaataaaatacgttaagtcatattttgttaactcgatacatttttcgttaaaaagatttttcaagtctgcttttgataattcgtggatgctgatgttgttgatttttgcgtcgtcgtcaaggcgaatagattcaccatttacggtataaatttcgatatacatcgtgccaccccttctaaattacatttgtttataattttctttgaatacaccaagttggttcagtgttacaacgagctgctggctaaaaagtggcagtgcttggatttggtctaaatcactggcataagcgaaatcagctacttgtaacacaagtgtatggaacgaatctgtcatggtttcgttttgttgttttaaataggaattttcctgttccaattcttggcattttgtttgtaagtcttggtattttttgtcgagttcttctttttgaacagcaagggacgacaaggagtaaatgctttttagtaagtcatatacgttgttttcttcaccttggttttcgctcaaaagttgaacattgcttttaacgccggaaagtaaatcaaccaggtttttttcgcgtgatttgtcgtagctgatttgttctttgatggacgctggtgctttgaattcagctggcacaactttgccgaaaatattggttttttctttttttgtatttttttgtgtttttctttttctcccaggcttgtttttcggaatatcttctacttggataagctctttttttagtttgtagtaagtgttttgtagttggcttggagtctttggaaaaatccgcaaatcatttaggctgagcatttcagagatatcaaggaccttcatatcttctaaaatagcaatttggtaacatgcggaaagtagttctaattcgatttttaaccaactaatattggaatgcatatatttttcgattccaccgtgttcttcaacggcttgataaaattcagtgagtaaatggtagatttcttcggcagtttgttcgtcaatgccagcttctgaagccatttttttaatttcagttgtagatgaattccccggattatctacttgttttttgatttcttgaagtaattttcttatttctgatttaggcatacaatcacatacctctctatcctatagtattattgattttctgtttatttttataataacaatatatgttagttgtgtaaagggaacgcgagtaggtcaaaaggattgggtatgaagaacctttttttgagttaaatagaaaaatataaatcaaataatgagaagttttcctttgatacagctgttacactggctgtttttttatttttacacacaatttcattttttaaaaaaagtatagattttttcaggatttggtgtaaaattttatattgcagttacaaaaaacactttattgatatatattttgaaaaaatgatttatttttgtaatctgatgaagggagtgaaaggtgaatttaccttacttgaatggaatattttttgtcacttttaaaaattattgtacttttggcagtacttgcgggaatttcttattttttagttaagaaaaacaagcaagcgaatcgcacgagaaaaagcgaaaatgatcttataaagttgaaagacactcttttaatctctcatcagttacgtgcagttcttctggaggcagacggggaaaaggtgttggcaattatttctaataatgatattcgaacggtatcattaaaaggaaaaaatgaccaaaatgaaaaacttttccgagaattacttttgaaagaggagactaaggaaaatgcgtaaaataacttctagacgagtatttcaagtatcttttattgttatttttgcaatttcgttggttgttttttggccgggtgtgaatgtgcatgccgagagttggatggattcgcttggtgtaaatggaacggacggggttaattctagtgtggcgctgtttgtactagttacggttctttctttgtctgcatcgattgtattaatgttcacacactttacttactgtattatcgttctcggtttaacgaggcagggtcttggcgcgacgaatttgccgcccaaccaagtgcttgttggactggcactgtttttatctttgtttatgatgcaaccacttattactgcttggtatgacgatgtgtataaaccttcgcaaaaagaagagtggagcgcatcaaaagtatgggacgaaacacagccgcttctgacaaaatatgtcgcggaaaatacatataagcatgatattaatatgatgttgaaagcagaaggagaagatccagttacaaaaaaagaagatgctccacttatggctttaatgcctgcttttattttgacacagattacccaaggctttttaactgggatgtttatatacttagcgtttatttttatagatttaattgttagtacgttactgatgtatcttgggatgatgatggtaccgccgatgaccattagcttaccgtttaagattcttgtttttattttcattggtgggtacggactgattaccaacatgatttttcaaacaattcacttttaagggagtagcaaaatgaatttaacgccgattacgcaaatttttcaagattttttctatagtgggctggcgcttattttgccggtgtcgctcatttgtatcgtggtagtgattgtggttgcgattttgatggcaatgatgcaaattcaagaccaatcgctgacgtttttgccgaagattgttgctttcgtagtggcgctctttattcttggaccgtggatgtttgaacacatgacggatttgtttgtaggaatcttttccaaattacccctgatgattagggtgtaaacatggagtttgaattttttcttgctgtagtgattgttttcagccgagttgccagttttttatttttcttcccacttctaaaagggcggaacattccgaacagtgtcaaggtggtgtttgggatggcgatttccattccagtggcaacatgggtggatgtttctggtattacgacgctacctgatttgctgctccgagtcacgtctgaggtggtatttggactagcactagcaaaattagtagagattatcgctgtaatcccgaaaatggctggttttatgattgattatgatttaggattttcgcaggtgaacttgattgatccttcgtacgggacgcaaaattcgattacggctgcgattttagatactttttttgtagtgatattcttgtcgctacaaggaatggattacttaatttattatttaatgaaatcgtttgaatttacggcttcggtttcgattttatttgaaaaagggtttattgatttgctgcttgggacgcttggttttgcacttgcttctgcggtgtcgattgcgctcccgattatgggtagtatttttatcgttaatatcattcttgcttttatctctaagagcgctccgcaaattaacatttttatgaatgcgtttattatcaaaattacgtttgggattttcatccttgcgtgcgcggttcctatcttgagtacagtttttaaaaatttgacagatgagatgattcaacaatatgtgtcgttttttgattatttactgaaaaaatagggaggagaaaaaagcttggcgaaggataataaaacggaaaaagcaacgccgcgccgcattaagaaagctcgaaacgaaggtaatgtggcgaaaagtaaagaactaaataatgctttttcactgctaattgtagctgggcttctttatttttttggagaaatgtttatcaaaaataccatccaagcttttgttgcccttttgaaacagcctccgaagctagcgaacatggaaagttatagtttgttttacttaatggagtttggcaaagtgttgatgccgattatggtgatggttgtgatttttggattgatgaactacggcgtgcaagtcgggattttattttccgcgaaagcagtgaagccacaattcaaacggctgaatccagcgaactattttaaacgagtgtttagtgtgaagggaattgtcgaggtcgtgaaagcgttattgttaattacgctactttcttatgtggcttacattggctttcgtgaccacttagatacgctcattagttacaccgggcaaaattggctttactcactcggacaaatttttgctttattcaaaaatgaatttctggcgctattcctagtaatcgcagtaatagggctgctcgacttcttttaccagcgctacgattataaaaaaggcttgcggatgtcgaagcaagaaattaaagacgagatgaaagattcagaaggtcgaccggaagtgaaacagcgccaaagaagcattgcacgaggacttctccaaggttcgattacgaagaaaatggcggatgcgacctttgtggtgaacaacccgacacatatttccgtcgtgatgcgctatgacaaaacaaaggatcacgcaccaaaactgctcgttaaaggggaagacgagctggcactgtttattcgtcaggtggcggatacggacggggtgccgatgattacaaatagacagctggcacgaagtatttactatacgacgaatccagatgaatacatacaagaagatttatataaagatgttattgaagtgatgaaagaattgatggacgcagacaaaatcaagttctaacaacatatgagcgacctttctaatcttagaaaaggcaggtttcaaaatggggaatttaggtgctataaaaaaatattttgctatcttgattgcggtctcgtttgttattgcacttattgtgccattacctccatttgtgttggatttagtgcttgtgacaatcttggcgttctcagtgttagtttacatgcgtgccacatcaattaaagattggaatgaattgaagtcatttccttctttgctacttttgatggggatatttcgggtttcgataaatatttcgacgacgagagcgattttaactactggagatccagggcaagtaattaagcaatttgggaattttgttattggtagtaattttgttgttgggattgttattttcattattttaattgtctttcagtttattgtggcaaatggttcttcacggacagcggaggtagcagcaagatttacgctggatgctttgccgggtaaacaaatggcgattgatgcggatttgaatcaacggttgattacagagccggaagcgaaagaaaaacgtgcttacttgaatatggaaaccgaattctacggagcgatggacggagctgggaaatttgtaaaaggggacgttctttttaccgttttgcttgctgttgttaatattgtattcggtttaattgtcggtatggtccaaggtgggctttcgttcggggaagctgcggtgaaatatacggagttaacaattggagacggcattgtgagccaaattggttcgcttttaatggcgatgtctgctggggttattgttactcgggtatttgacggatcagatgataacgttgcggtcgggattttcaaagaattaatgcaaaactcggtggttgtttatacgcttgctgcaatgtttatcttaatgggcgtatttagcccgctgccaacgattccgtttgtcgggattggcgtcgtgcttggtatcatcggctatcgtacgcaatttaatttaaagaaaaaagagcagttggaactggaaaaagaaatggaattgattcagtcggaaacgaattcggcagaggcggagcacaaccaagcatttggcgcagcacgagaaaaatttccagtggttgttgaacttggtttaaacatcgctgcactcgtgaagcaaaaaatgaacggggaaacggcgaaggataaagtcgtcttaatgcgaaaatcgattttacaagatttaggtattggggttccgggcattaattttaaagataatacaagttttcagccacgcgggaaatacgaaattaaagtaaaaggtgttgcggttgcgagcggcgttttaaaagcggggcatttgttggctttgaaaacaccgggtgtgatgatggatcttgatgccgaacctaccaaggatccaattttcggggaagatggttattggattttgccgggcgagttagaagatgcgcaaatgaagaactatcaagtgcttgagccgctgagtattttgattacgcatttggatgttgtgcttaggaagaacttgcatgaactcctgatgcgccaacaaattaaagatttaattgatggtcttgctgatgaaaaccaaattttgattgatgaaattaagaaaaaagaaattgattattcgctaattcaaggggtgctacgacaactcttgaaagaagggatttcggtccgcgatttaccaacgattgtcgaagggattattgacggacaaacgatttatccaaatgaccttgacgggattacggcttttgttagggagcggatttcgaaagttatttgtgaacaagcgaaaaaccaagatggcaaaatttacgcgctgcttttacaggattcgattgaaatggatacggaaattgtcaacacgccgtattatggctacgcgcttaactgggcgctcgacaaggaactgccaatcattcaaaaagtaagggataccgtgaataaagcgcaactcactggacgcgaacccgtcattttaacaaggcgaaaagattttcgttttggctttgtacgagttttagaaagatatcaattggatgtgccggtgctatccattagcgaattgtcgccggaaacagaagtggagcaaatcgcactgattgaaccaacttgatgagggagggaatccgtagcaatgggaaaacatttagtagaaaagatggaaatttttaaggggaactccaagcgagaaatacataaaaaaattcaattagtaacgaatgagccatataaaattacggacgaacgtgtcacaaagcttgggatttttaagaaacagtatgaagtgacggcggtcattatgagtgaagtggcaatagctgatggtcgaatggacttccaggaaacgtttcaaaaatcggttgtgaaaacgagaccgaaaacggacgacttattaaaaaaggaaaaattactagaaatgcttgctgcgggagcggaactagcacaatcgacgccgcttttagaagaacggaaaacacaagaagaagaattatcatcaatgcgtctcgaactagcggcattaaatcgagagcttgcagtgaaaatgcgcgaggagcgtgagcaaaacagtgatttcgtgaaatttttgaagggtcgcgggattagtgacacttatgtggcggactttatgcaggctgggcgaaaacagtttaagcaagtagaaacggcgcatttggatgatattacagattggttcgtcccttatttatctggaaaattagcggtggaggattcgtttgatttaagcggccaccgaattatttccttgattgggcaaacgggtgttggaaaaacgaccacgcttgtgaaacttggatggcagctgctaaaacaaaatcggacagtgggctttatcacaacagatacttttcgatcaggcgcagtggagcagttccaaggctatgcggacaaacttgatgtggaactcatcgttgcgacgagcccggctgaactagaagaagccgtgcagtatatgacatatgttaattgcgtggatcatattttgattgatacggttgggagaaattacttagccgaggagtcagtgagtgaaatttctgcatatactgatgttgttcatccagacttaacgtgctttacattttcttctggaatgaaaagtgcagatgtgatgacgattttaccaaaactagcagaaattccaatcgatggttttattattacaaaaatggatgaaacgacgcgcattggtgatttatacactgtgatgcaagaaacaaatttgccggtgttatacatgacggacgggcaaaatattacggaaaatattttcagaccaaagagtcgttggctagcggagcggtttgttggaacggataggaggcaggtagtggaatgaagggattatacattggcgcagcaggaatgatgaactatatgcaacacattcaagtgcattcgaataacgtggctaatgcgcagacgccgggtttcaaatttgatcagcttacaagtgaagtgatttcgagaaacaaagtgaactatcaaaatgggcctgtcactaggcaagttgggacaattgattacggtgttcgacctgctgcaacgcatattaatttgacggctggatcaagctatattacgaaccgcgaccgagatttctttatgcaagacacggatcctacgcaaggaagtaattttttcattactgctaaaaatggcgaaatttcactttcacgtggtggccagtttcattccgatcagtttggttttctgcggacagcggatggcgccaatttactcagtgcgactggagaagcgattcaagtggggcaaaaaacatccattcgcgccgaagcaaatggtgatttatacaatgcggaaacaagtcaatacttgggccgccttggaactaaatttgtttctgctaatcaagcagatagtttggtgaaagatggggaaggtagacttcatataaatggtgtaaacacaatgaatttaccagctggacaagggattatccaaaatggagttatcgaaacgtctaatgttgatttaggcatagaaatggtacaactcatggataaccagcgcatggtacaagcttcaaaaaatgtcgttaatatgttcgataaagtgtacgacaaagaagcaactggattaattcgtcagtaacggcctggctagggggaggggaaaaagaatgattccagatttggaaaaggattatctttactttactcgtgtcgtcaaaagggacttaggtttagatttagcgctttataaagaaacgcaaatgaaacgtcgaattttatcttttatcgtgaagaagaaatatattacatttggagaatttttcaaacatctcaaaaaagatgccgttcttttagatgagttcattagtttaattacgattaatgtttcgtcgtttttccgtaatcgcaatcgctgggatgcactggaaaaacaagtacttccgagattgctggaagatagtcgcgggaagctacgggtatggagtgcggcttgttcatcaggggaggaaccatactcgctagcgatgatgatggaacgctcagttggcacaaggcattatgatattttagccacggacctcgaaccagctattttaaaacgcgcggtcattggagaatatcaaagccgtcaaatggaagagttaagcgaacaagaacgtcatacagcatttgttgaaaaaggggatacatatcagattttacctaaatatcgaaaatcgattcgttttagacggcacgatttgctgaccgattattacgaaaaagggtttgatttaattgtttgtcgcaatgtgttgatttatttcactgcggaaggaaaacaccaagcatatcagaagtttgcagagtcactaagacgtggcggtgttcttttcatcggaggatcagaacaaatcttgaacccagctgattacgggcttgccacattaaataattttttctacataaaaacttagcaaaaaagaaatggagttggttagatgggacgaatagaaaacattaaaaatttagcgttttttgaggacaaacctggactcgcagaacaaattctcatgcttgaaaagaaaacacaacttttcttaccaaatgaatttgaaattagacaaacagttggctatgaaatcggggataaagaagttattctaggccgactcgagtcgttttattttctcgctttaaaaggtgtgggagaaaataattaccgctcgcaagcatttgccagtgaagcggatgctaaagcgtttttcgttcatttaccagaaatggaaaacgagttagttgccttttggttaaatgaagtggaattagttcgctgaaataagtaggtgggagatgaagtaacgtggaaataacaacgataataggacttgtgttggcagtgatagtcattgcaggttcattcatgattcaaaatatatcactggcgatgttatttagcgctgaagcattaattgttatcattcttgggacaattacggctgttatgatggcgcacccatggagtgatgtaaaagtagtaccgaaactattcaaaattcttttcacaaaagagaagatgccggacaaagtggatgtactcgtgcaatacaaagaatatgcagatgaaattaggcgtagcggggtactggcgctggaggattctgtcgatgaaattgaagatccatttatgaaacgaggcatgcgcttagttgtagatggtcaatcttccccagaatttttacgggatgttttggaagaagaagtagcgagcatggaagaacgtcatgctgcttatgccaagatttttgcatcagccggagcatatgcgccaacgctcggtgtacttggagcagcgatgggactcattcatgcgatgggcgaaatgtcgaacccagacaaacttagcgaagcaatagccgcggcgtttgtttgtaccattttcggtatttttaccggttacgtgctttggacaccatttgccaataaattaaaagtgaaatcacaaaaagaagtgcatttgagatatatgatgattgagggagtcgtcgcgcttcaagaacgaaatgcaccacgtgttgtggaagaacgtttattatcttttttaagtccaaaagagaaagatgtgctgcgaaatggaaaagggaagaaaacgagagaagtggaggaaattgagcgtggccaagcgtcgcaagaaaccgcaggaggaacacgttgatgaaacgtggttaattccatatagtgatttgctgacacttttacttgctctatttatcgttctgtttgcctccagttcagttgatgcaaaaaaattcgaacaaatgggaaatgcgtttaagaaaattgtggaggaaggcgcggcaggcaaccaagcatatgtatcaaaagaaaaaggaccagatgatccaaatgtgaatgcagtcttgaaggcgatggaagagcaagataaaaagaaagaagcaaacgaacaagagaaagccaagaaagcagcagcagccttacttaaaaagcaaaatgaagaaaagattgaagcctttaaaaaacaaattgatagttatattgcagcagagaatttaggaacgaaaatgacgacgaagtactcggatgaagggcttctgattactatccgcgatgatattttattccagtcgggtagtgcagaattatcagctgggaaacgcgaaatcgccaaagaaatcggcgaactttttgcgcaaggtaagggaacgatggaagggattgtttctggacatacggataacgtgccaataagtacctcgatttattcttccaactgggaactaagtgtcgcccgtgccgttaatttcatggaagcgatcattcaagaaaatagtgaagtaaaccccggcgagtttagtgctcgtggctacggcgaattcagacccgttgccaaaaatgatatcgcagcaaatcgcgaaaaaaatcggcgtgtagaaatcatggtgcgcccaattaatcgcgatacgcttgatgaagatgagtaggtgagttgattgcaactttttttaagcggttcgcatacgttaaccgattatgacaaacaagaaatacaagcatatctcgaaaaatttgcaccagtgaaccacattcacttgctttgttataagtcgattgaaaatgaagtgttacaatttttcttgaaaaaagagcatttagctccgcgcttgtcgatttacacttttgcaccgaaagaatgtttgccagagccgtttttatccgcgatagattacttggaacgcttaggaagtagctatcaatcatttgggtatttcgatacggtaattgccaagccgacttatgagaaattcttagcacaaattgttagtaaaatggatttggtttgttgtttttataacggggataagccgactgatgtgataccagtcgatgttgcgaaagcgttcgatgtgcaaagtatgatttatgatttgccaaaagcgaagaaacatctactgcaccgtgcgagtagcgataaaataaaattagtgaattaattgatagaaagagggaagattcatgcggccgttaatttcgatttgtatgatagtcaaaaatgaagcacatattttaagacaaagtttagcgtcttttagaaaatttacggaagaaatcattattgtagatacaggttccactgacgaaaccaaggaaatcgcacaagaattcactgattttgtctatgactttgaatggactggcaacttttctgatgcaagaaactttgcggccaaacatgcaacgggaaaatggattttagcgattgatgcagatgaatgtttggaagaggaaagttaccgcaaattagaaaaacagttgaaatcaccaacggaacccattcaaatggcgcaaatcattagctttacaggggaaaaaggacgagtgacaacaacaaaccaaatggcgcgggtttataaaaatgacggcacaatttgcttccgcggcgtgatccatgaacaactagaagcaatcgacaaacgcccgattgcagctggtgttgctgaagtaaaaatttaccattatggctatatgtcggaaattgtcgaaaaacaagataaatcagaccgtaatttacgtttattagaaaaagaagttaaaaataataaaaatagcggatttgttcattttaatatcgggcaagaaatgaatcgacttggtaataaaaaagaagcgctgaaagaattttccgaagcattccgattgcgcgatcacaatcactatatttgggcaaaactaagtgcttatcatattgcggagctacttgagcaagaaaaacgttatgacgaaagtttggcaattatcgaagaagcaagagttatttggccaaatgtacctgaattcccgctaaaaaaagccaacattttatatgtaaatcaccaacttgaagatgcgaaagaaatttaccaaagtttgctagaaaataccgcaattgactaccaaccaatcgtgttgtacgaagcaaccaattttatgccgcacaaaatgctaggaacaatttacttagaagaaaaagattatacgcgcgcgatgactcatttttctaaagcctatgcggaaaacagttccgattacggtgtgatgttccaaatgattatgctgcttagcaagttccatcaaccaaaagaaatcttcgcgtttatggaacgtcaccatttcatctctagcacggaaacaggcttgcgcttactttcgatgacaactcaacaaggctacgcagaattatctgaactaattgttcagtcactaaccgatgtgtatccacctgtcgcagaagcaacagaggtgaagattgcaacgatccgcaatgtcttcccggtaattagcgagtcggctattttattcggtgttaaggaagaactaattgatgctgcggatttgtgtttgtggcactatgaaaatccgcaattaccaatcgaaaacgtcatgaaaaatagcgatgttggcgacatttatgattttatctttgaaaatggaccgcgtattagtaagaaacgttatttatttgtattagaacgggcgattgcacttggaaaaggcgagtttgctgattacttattggcacttcgtaacgtttaccatgacagcattaatagccacattgcagatttgtttttccaatatgattttgcggatatcgcgctcgatttctacaatatcgttgatgcagacgaagtgaccaaacaaggctatatcaacctaattaattatttagtagatgctgatgtactggatgaggcgcttgcgattgcagaacgaggcatcgataattttagtactgatttccgcttttacctttgggcaatcaaaattgatacagaaaaccgcgcgaaccgaatcagcgaggcaatggatgaatttccgaataaccgttatttagcaaaactgttggatgaagttaccatgcttcaagacactgttacaaacaatcgataggaggccagtaatatgacagaagaaaaaggaattttactacaaagtggaacaaatgaacttgaaattgttacatttactgttggcgaaaacttattttgtattaacgttttaaaagtgaaagaaattattcatccgcttgaagtgacgcctgtaccagattcgaatccggcaattgaaggcgtttcccaagttcgtggcgagattatgccagtcgtgaaccttgctcgtgtgatgaaattacccgaaatcgaaccagaaaacacgaaatttattatcacagaactaaaccaaatgaaaatcgttttccgtgtagatgaggttcatcgtatccaacgtatttcgtgggaacaaattgaagaaccagaaaaactatcgattggtttagaagaattagcagttggtatcgtgaaactagacggcaatctagtgctattgcttgattatgaaaaaatcatttatgaaatcagcggaaatgccgatttcgctgtgactggcgaagatcgtatagcacgaaaagtaaaccgtgaagagaagacgatttttattgccgaagactcgcaaatgctgcgtcaactgcttgaagatacgcttcatgaggccggttatacaaatctgcagttctttgcaaatggtcgcgaagcccaagaacatattttcaaattgctcaaagaacaaaaagagcaaacgtttgaaaatgtcaacttgttaatcacggatatcgaaatgccgcaaatggacggacaccatttaacaaaagtaatcaaagaagatgaaattggtcgtgaattgccagtggttattttctcttcgttaattacagaagatctggaacataaaggtgctggtgtcggagccgacgcacaagtaagtaagccgaatattcatcaactcattaatattttagatgagctagttttataaaaagaagtgtttggacaacttttctgttcaaacacttctttattttattttaaaaaataaatttataaaaacataaaaacgttgatataaagccgatatttcgtttttttataaataaaaacaacttatttttacatttttaataaaaaacatttgattttttaaaaaaatgaagatataataaagcatatagagaagagaagtcttttctaaaccgaatgtaggagggaaacacaaatgaaagtaaatactaatatcattagcttgaaaacacaagaatatcttcgtaaaaataacgaaggcatgactcaagcgcaagaacgtttagcatctggtaaacgtattaacagttctcttgatgacgctgctggtcttgcagttgttactcgtatgaatgttaaatctacaggcttagatgcagcaagcaaaaactcatccatgggtattgacttgttacaaacagcggattcagctcttagctccatgagttcaatcttgcaacgtatgcgtcaattagcagtacaatcttctaacggttcattcagtgatgaagatcgtaaacaatatactgctgaattcggtagcttgatcaaagaacttgatcacgttgcagacactactaactacaacaacatcaaattactagatcaaactgctacaggtgctgctactcaagtaagcatccaagcgtctgataaagctaatgacttaatcaatatcgatcttttcaacgctaaaggtctttctgctggaacaatcactttaggtagtggttctacagttgctggttatagtgcattatccgttgctgatgctgattcttctcaacaagcaactgaagctattgatgaattaatcaataacatttctaacggtcgtgcgcttctaggtgctggtatgagtcgccttagctacaatgtatctaacgtgaacaatcaatccatcgcaactaaagcatctgcttcatccattgaagatgcagatatggctgctgaaatgtccgaaatgactaaatacaaaattcttacacaaacttctatcagcatgctttctcaagcaaaccaaacaccgcaaatgttaactcaattaattaacagctaataacatatcaaattcatttatcgaacattgtttacccttagcctctcgtcaccccggacgaggggcttttcttttgatttataaaaatatttttcaattgtaaatggggcacagagccaatgttaagttggttaactattttttgaataattttattataaaaaacggatattttttaagaaaaaggtagaaattgtcctgtttttattataaaatgatattatgcgatttttttaaaaaatatttataggtataggaatgggagttgtattttatgttgaagttgttgattgtcgacgatgcgatgttcatgcgtacgatgattaagaatatcgtgaaagatagcgattttgaagtagttgcagaagcggaaaatggactggaagcagtgaaaaagtatgatgaagtaaaaccagatatcgtgacactggatattacgatgccggaaatggatggcttagaagcacttgcgcaaattatggcaaaagatccatcggcaaaagtaattatgtgttcggcgatgggtcaacaaggtatggttgtagacgccattaaaaaaggtgcgaaagattttatcgtaaaacctttccaagcggaccgagttttagaggcgttagaaaaagcagctaagtagagaaatggaggtggatagcatgactacaaatatgttagacctgtttatagaagaagcttcagaacatttacaggcgctaaatgataatctgttacagcttgagaaagacccgacgaacggtcagttagtaagtgaaattttccgttcagcacatacgtttaaagggatgtccgcaacgatgggcttccagcaggtggctgatttaacgcatgcaatggaaaatgtactagatgaggtacgcaataatcgattggctgtaacagaacatttggtagacattatttttacatgtacatctcatttagaaacaatggtttcggatatccagcacggcggacaaggcgcggcggacatttcgaaaaccgtagctgacttagaagcacttttacacccagagcaagaaactgatttaacggtagaaaaaacttaccgtattgccattcaaattgaagaagcagccattttgaaagcagtgcgggcggtaatgtgtttagagcgacttgcggaaatggggattatttcagaaacgacgccagacagagaagcgattgagctagaagagtttgagcagtcatttgaagtagtcctagagtcggcgcaaacgaaagacgaaatcaaagcggttattctggatatttctgaaatcgaaaaagtgactgtgacagaagaagtggaagaagttcaggttattgaaccaatcaaaaaagccgcaaaacaaacaaccaaacgattagaaaataaaaccattcgtgtacaacttgaaaaaatcgaaaagctaatgaacgtttttgaagaaagcgtcattgaacgggcgagaattgatgaaatcgcagaaaaaaccaataacaaagaattgatggaacacttaggacgattcagttccatctccaaagaaattcaaaacggcttactaaatatgcgtatggtgccagtggacagtgtgttcaatcgctttccaaaaatggtgcgcacgctagccaaagaattaggcaagaaaatcgatttagtgattgaaggcgcagatacggaagtcgataaaatcgtcattgatgaaattggtgacccacttgttcacttaatccgtaattcggtagatcacggcgctgaaacagtcgaagtgagacgtaaaaacgggaaaaatgaaaccgccacaattaatctaaaagctttccatagcgggaacaatgtcgttatcgaaattgcggatgacggtgcgggaatcaataaacgcaaagtgttagaaaaagcaattgcgaaaaatgttgttacaagagcagaatcaacgaaaatgactgacgcggaaatttttgatttattatttgattccggtttcagtaccgcagatcaagtatcagatctttccggtcgcggcgttggcttagacgtagtccgtaacaccattcttaaaatcggcgggaaaatcagcgtagaatcaagtgaaaacgctggttcgacgttccgaattgagattccgctgacattatcaatcatccagtcgatgctcgttgcaacatctgaacgccgctatgctgtaccgctggcaaacgtggccgaagctatcacaattaatccagcggacattcaacacgttcacggcaaagacttaatcaactaccgtgaaacgattattgaagtactcgatttaggtgaatgcttccatgaaacacctttgaatgacacggatgaattactattgctcgtcgtgaaaaatgccaagcgtacttttggacttattattaaagatattatcggtcaacgggaaattgttttaaaaacacttggcggctttttcagcgaaagtcaaattgccttttctggggcaacgattttaggcgatggccgtgtcgtattaattttaaatttagaaacattttaaggagggaccatgatggaacaagtatttcaagtagaacttcctgaatgggaaccgaaagaaacacctcaagaaggacgcgaaaaaggctctattcgccaagttgacaatattggcgttaatttaatcgtccgtcttggaaaaaaagaaatgccagtaggggacattgccgagttaagcattggcgatgtcctcgaagtggaaaagaaacctggccacaaagtcgaaattttcctcgatgaaaagaaagtcggcatcggtgaagcaattttgatggacgagaacttcggaatcgttatttcagaaatcgactaaagaaagaaggcaagtgatttgaagcaagaggcttataacgcagtgaagatgaaagtggaccaagagaaaacggccattttgaaggaattgcaattattactatccaaacgggaaaaggtcgcagaaaaattagcgcacgaaaaagaagtgtattactcgagaacaaaaaaagaaagactccaagtggtggtattagctggaagtatgcaactcgatgccttctcgccgagccgcattcaacaaatggagcgagaaattactcaaattagccagtacattaaaagcaatgaacaaatcttagaaaaactcgaggaaaaagggaaacaggcgaaaaaaatgtacgatgacacacgaaaaaaatggcaacagcttgaaaataaaagagaagaacaaacattacgcgatttaaaaatggtgctattaaagtaaaagggaggaaaacgcatgctaatcccagataatttgctacaaccagtcgtcggaaaaaaacaggtcgaaccaaaagaatcgttagcagaagaattagtagaactaccttttatttcacttttaatggaaaatagccctgcgccgctcataaagggagaagcggataacgaagaacaagctacaattccgctaaaagaaatcgcaccatcactcgtttcagccaaactgctcgacagcgaaccagaaacgaaactaccaagcgcaccgcttgagttgaaagaagttaaagaaacacttgcggcaatcgccaaacaagctatcgaccaaccaaaaatagacagcgccccgcaagtagcacaacctccagaaatgaatacaccgaaagaacctacaaaaaataccacccgagagcaacaaccgccaccagaactcattatgcctacaaaagactcacctaaactagccgaaaacgtagctaaaaaccaaccagcccttgccaaattacctcaagaaaaagaagccgtgcaacttttcaaagcgagcattaaagaaccagtaacagcgaaagaagaagtcgccgtcaaaaagcccgcggaatcaagcaacatttggcatgacacaacgaaacagctcacaccggctgccaaagtcgaagtcccagtcacactaaaacaactcgataaaaccatcacggaccaaatcgaacagctgcaaaaattccaagtgaaacaaaataaagcctttttcgccatccaaccggaatcactcggaaaagtggaagttttacttaaaaaaatgcccgataaaatttttgtacatatcgaatatcaggaacaaacggcgaaacaaaaactcgaacagatggcgcaagatttacataatcgcttccgagatcgcggcgtagaagttgccgtgacaatgaccgaaaaacaagcaccgaaagagaatggtcaaggctcagaaggtcgacaccacggcgaatctaaaaaagaaaaagaacgagaaaatccacaccaggaaaaagctaaacaacaagtatttgatttagaggaggagacataatttggacggaattagtagtttatcaggagcgagtcaggatacaaacaatgcagtgacatcaagcgtatcgaaaacccttggcaaagatgactttatgaaactatttttaacgagtttacaatatcaagatccatcgagcccacttgatacgaatgaaatgatgtcgcaaatggcgcaactttccttaatggagcaagttgccaatatgaccactgccgtagataagctttctgaacaagcgcaaaactccgccttgcaatccgcggttaatttcatcggtaaggatataaaaggtgtttcactaaacggcgaagtaattagcggcaaagtcgaaagcgttcaacaaacaacaaatggtgtcatgctgaaattaaaagataacgatagccttgtgccaatgacatatgtaacagaaattaattaaaaatttgggagtgtgaattatgaatcaaactatgtatacagctatttctgggatgaatgcgttccaacaagcattatcagtaacatcaaataatattgccaatgccaacacgacaggatataaaaaacaaagcgtcgttttcaatgatttactttaccaaaacacaatgggatctgttgcaggcggactttatgctggaacaaacccaatgagtttcggttccggttcgaaaattggggcgattttaactgactatacagcaggttccccgacttcaactggcagaaataaagatgcagcactacaaggccgcggctttttcattgctggtgataacgctggtgggaatatcgtttatacacgtgacggtagctttgcagtatctgacaataactatttaacaacgcagcaaggaaaatacgttatgggttacgcaacggacaaaaatggtaacgttttaaacggtaatttacaacccatccaaattccgctaaatagcgcaattccaggggaagcaacaaaaaatggtagcctaagcggtaacatcccacttgattggggcgaaaaagatacgatttcttccgagctgtctgtatacgataatgctggcggaaaacataaacttcaagtcaatatgaaagcagctacaccagatgcgagcggtaatgtttcctacgaatatgaaattcaaatggacggcaaagcattaactcctccagtgacagggacacttaattacaatgcgcagggtgaactaacgaacccagacgcacttaaaaatattcaaatcaattcaacagtaaacggcaaacaagtcaatatgggcttaaacctaagtggcttaacaaactacggaacgaaccaagtattctcaccaacttctgatggcaaaggtgctgcgactgtaaaagattatgcagttaccgattctggctatattgcagtgagttattcagatggtacagttatcccagttgcccaactcgcggttgctacgttctccaatgaagacggtttagtcaaaatggggaacggcgaatatgttccaggattatcttctggtgatgcagtatacggcgttgctggccaaaatggcgctggcggaattagtggttcttccctagaaggatcaaacgtagacttgtcccgtgaattcgttaacttaatgacatatcaaagtggtttccaagggaatacaaaggttattcgtgtggcggatgacgtgatgaaacaaattgtgaacttgattcagtagggagtttagctaaatgaaaattaatcatactattccgctcagaatcgacttcgagttaggacgcacgaaacagccagtcggtagtttgctagatgtaaaaaaagggactgttttccggttagaagattctacagccaatgtggtcaaaattactatttccggcaaatgcatcggttacggcgagattttgacaaaagacggcaagatgtttgtcaaaataacgaaattaggagagggaagttcttcatgagagctagggagtgacaaaaaatgagcgataaattaagtcaagaacaaattgacgccctgctttcccaaatgagtgaaggtaaggtagtcgatgaaagtacggaaattggcgactttgggcgctttcatccctatgactttcataaaccagagaaatttggtgcggaacacctcgaaagcttaaagacgattgcatccgcttttacgaaaaaaagtatggagtttgtttcccagcgtattcggattccaattcataccgaagcaactcttgcagatcaagtgtcttttgcgagtggctacattgaaacaatgccgaacgatagttatattttctgcattatcgaccttggtaatccggagctcggtcaaattattatcgaactcgatttagcttatatcatttatattcatgaatgtttatctggcggaaatccaaaacgaaaattgagcgagcgcagacttttatccgtttttgaagagttgacgttgaaatctattttagagaaattttgtgaggcacttaaagatagctttaaatcggtgcatccaatctcaccagaaatcgttaatatcgaaaccaacccagcgcttctacgtgtgacatcaccgaacgacatgatggcacttgtcagtgttgatattaaatcagagttctggattagtacaatgcgtattggtgtgccatttttctcggtggaagagattatgaataagctagaaaatgttgtggaatatacgtttgataaacgacggaactttgatgcggaagtcgagcaagaattgcatcaagtcgaaaaagaagcgcgcattcgtgtgggtgaaattaaaacaacgtggaaagagctcaacaagcttgaagtaggcgacgtccttctaacagaaacacacatacgcgatacactcaaaggctatgtcaccgaaaaatggaaatttgaatgttatatgggaaaaagtggtaaccaaaaagccgttaaatttatgcgtcatacagggcggacagagcaggagaggtagaagtggagcaattactagagaaaaatatcacgcaaatggaactagatgtgataggagaaatcgccaatatttcgtttggctcagcttctacggtcttatctgatttactacaccaacaagtcaccatttcgacgccaaaagtagagattgttgatttatataatacgaaagacattgatattccacatgtcgtgttagaagtgaatttccataaaggaatcgaaatgcggaatttatttgttctgcaatcagaagtggctgcggctatcgcggacttaatgatgatgggcgatggcaacattgatccaaacgaagaactttcggaacttcatctcagcgccgtgcaagaagcgatgaaccaaatgatgggacattccgccactgcgatgagcaatatgtttggcgaaatgattgatattacgacaccagacattaaagtaatcgcgctaaaagagcaattagaagatacgaacgaccaaacgatgataaaagtaggctttgatttaattattggggacttaatcacatccaatttaatgcaactcattcctgttgataaaggacgtgaactagcgaaaagattgcttggtgatgcagttccagaagcagatcctgtaaaagaagaaatcagcttaacggccgaagaattagatgtatttttagaagtatgtaatattggcataggttcagcctcgaccgttctatctaaattgcttaaccgcaaagtctctttgcaaatcccgacagcacgtgtgattgatagcaaagaattcgagtttaatgaacgaccttgcctcgtaacgagcgtggaatttgtcgaaggactacgctcaagcaacacctttatcattagcaaaaatgccgcgttaatcatggcggatttgatgatgatgggggatggcattgttcaagaagacgccgagttgaccgaacttgaagttagcgccgtgcaagaattaatgaaccaaatgatgggcttttcggcgacagcaatgtcagaaatgctcggaacaaaaattgatattagcccgccaacgatggaattctgcaattttggcgatacgatgattcaaaaaaacatcgaggaaggaaaaacggtcgaagttatcttcccactcgaagtagacggcttactaaaaacaccaatgtaccaaatttttaatccagcagctgcaaaagaaatggcgcaattaatgcttgggattcaggcgaaagaagttgcagagaaagaagcaacgactccggcagaaataatcgaaccggaaaaaccagctgaaccaataaaacacacggtaattgaagaaaaagaaacactttccgaaatggaacaaattttggaggatattcccgtaacgcttgaagtggtattcggaacagcaaaagtaaaactcgagaaatttatctcttggtgtgaaaaagacgtgattatcctgaaagaaagcatgaacgaacctcttgtcttagcgctaaacggcgtgacgattggcaaaggaattttagttcgcgtggatgatcattttggcatacaaatgactgagttagtaaggtgaaaaatgtgcgaaaacttggactgatgacaattttattttggatgtttctttcggttcaagcttttgcagcagacctggaacctccgatgatatcgcttgaaaaggaacagcgtgtttttacatctggtgaagtgatttcgtttcatgtcaaaaatccggaagagctaaaaattgtcttggtgaatgaacatggacaaaggaaacttctggacggggaaacgtatacggtgacggattgggatttggacgggaattaccaggctgaattttatcaagcagatatttcgaaaccggttgttactgtggaagacttatttgaagtgaaacagcttgaggaagttgcaaaagatgaaacggcgccgagtttgaaaatgatagaaatcacgcacgatgaagatgtcttaccgacgagcgtgctatatgcatcagccgagttggatgacgcagaatcaggcgtgaaacaggcgattttgcttgttcatagcaaatctaatgaatcggaaatggaactcattcgcaacaactatacaggggagtttgatgcagaaatccctttagaaaaattccaattgggtgaagaactaacttttcaactgcaattagttgattttgccgagaatgaaatcacattggacttagaaaacaccattcaactatatgaaccaaaagcacctgttttaagttatgacggtagtgacatcacgaacgtccagaaaaaaatcggacaagttggtaatagaatcgagctaactctcgacaaatatacaacagaatttccggaattagaaacagagaacggcaagactatcccattattatggcaaaaaacagcaactgaatggaagggaagcctggctttaacgacagagctatccggcgaaattattcatattcaagaaatgaatcaatacatgcttgtccgcgctactagtgaaccatttggcgatattcagctaatcaataattccattttaaccggcaccattcatccggatttcacattcatatcgaatctttacgtcgaagtgaatggccaaaatttcccaatcaaacgaacagacaacagttttacaagcgcggaaataacaactactggaaaaattactcttcactggacagactgggacggtcaagttttttccaagcaaatgaatcaagaaatcaaaccagtgattgaaatgccagataaagaaacaattgcaccaccatcagtaataccgaaagaaaaagaatcattactgacatcacctgatcctaaaccatctgttgagtcacatgaaaatacgcccaaaaagcaggaaaagaaggaaacctcaactaaaaacaaatcaagtagtatcccgttttggattccagcgctcatgattattggcgttattattttttcgggtaatagagcaatgaaataaaagcagaagcgaggtggacggaatgaaaatagatggcattcaagaatctgcagaaaatcgtaatcaactagaacgggaactaattaaacaaaatccagttgtaaaagaaggtacgataaaagcacaaatgaatacagaagttgcagtaccgaaaacgccgccagtatcattctcttttaaagaactaagcagtttacaactgaatgggacgagtgctgcaagtttagagttgtacatgaaattaatgatgaataatgctaaaaaagcgaatgatttaatcttttacgtcatgcgcgcgggcataaaaaaccccactgattctaccaaatggcaaacagtcagaagtgaaatcagtagccaattaagtacgattctaatgaaacaacataattttgaagcgtatttttccgaaaatccagcgaatcaaaaattatttttagcaaatcaaaaaattatgaatgaaatctcctttttactgaaaatgttaccaactttaacttttgaaacaactgggaaatacgatttcttacgtatgatgcaaatagcttctggcaatatggagacgggtatccaaatgatgcgcgaattccagggacatatcgaacatgcgacaagattagactcaatcgttgatgcaagacaagaaacgaactggatgattaaagtgttacgcgaatttggcaatatgttccaatcgcgccacttattaccatatgaattgcaggcagaaaacatcaatatttggaagttgggtagcgaatacttaaaactaatgaaccaacttttacctcaaattggcgcatttccaaatgggaatatcaaaatttttcaccaacaagcgaccaagccattaacggaacttttccaagaactgcaacgattagcggacggacaaatgacgcaaggtgggatcgctgttattttagaccggatgcaaggccaacttacacgactagcacaactgtttcaaaaaatggaaattgaagcaggttttacagataccgaacgaattttaggtagtgtggacgccgaattcgcgagcgatatgacgaaaatgatgctactcgcacaacaagaaatgtcattttttgatttattagtaaaagatttccgcagtgtctctaaacaaccaatatttttcatgatagttgccatatttattattttattattaattattttattttaaaaaagatattttttgaaaaaatatatactttttcaggttgtttcagtataattaaatagaaaaataaggtttagaaagcgaaaatgagtttttcgggggaaaaaggatgaataatgtttcaattggccaaatttcgcagtccaaacagacgaatgtagttaggggaatacaagaattaaatcaaacacaacaactttattttgaacaaatgaaggcgaatggcaagaaacaaactccttctctgactgaaattaacgaactaattacgaatgtcacagataaaaagtcactcgttgaaatggatatgacggtagataatgttttgagctataaaaaagcagtccaaacatttttaaatttttatgtgaataatgtgatggattacgataatatcgaaagccgccacccaaaatacggtttttcacaaaaaatgacgattttaaagcaagtagaaaaacaaacgaatgaattagatgatgtaatgaatttaatcgacacaaaaactggacatttagatatgctaaaccgtattggtgagattactggcatgattctcgatgtcgtattgtaggtgatgggtatgcaaaacgaattaatcaatcaattagaaatcttaatcgaaaaaaatgtcaaagctaccgatgaagcaattttactaggtaaattagtgcaagaagagaactggattgaagcagaagagcgccaattagggctacaacgtgaacttgccgctttacaaaacgaatatcaagctttaaaaacaatcattggcgaagataatacgcttagaactgtccaaaatacttggacacctgaggaaaatgccattatagatgaacggaaaaaaatgctacttgaaaaagaaaaccttttacgagtaagtgttacggaaaaccaaattagaacagaaatgcaattggctttttcggaacatatggtggatgttattacggggcaccacgcggaaacacaagcagaaaataatatgatgataaacgagactttttaagtaaacggagggattttttgtgcgtttaagtgattttaatacgtcattatcgggcatgtcagcggcgcaaatcgctaatatggtcgctcagcaaaatattagtaatatgaatacgccggggtacattaggcaagctgtggatcagacagcagtttacggtgacggtggtctacttggtgggaaacaaacgggctacggagtcaaggtgacagacattaagcgtctaactaacacagcgcttacgacacaatacaataatcaaatcgccaaacaatccgcttcgttatatcaaagtggggcgctgaatcaagcacttaatttatttggtactcccggaaaaaatacgccaagtgataatttggataacttcttcaccgcttgggcagcattagcgaaaaatcctgaccaagcaacgaatacaacggcacttttatccagtatgtcgatttttacggatcaattaaaccaacttcattctggcttaaaagaattagaaacaaccattgcagcagatacagatgccgcgatccaagacttaaattcattaattaaaaaattaggcagtatcaataaagcaatcggaaatgcaggctccaacccaccgaacgatttactgaatcaacgtgatcaactacttagcacgatggctggttatgctggaatttctgtgagtgcccatccgaataatccagatgtgtacgatgtgacaatcggcggacgtcttgttgtccaaggtgacgaaactaccgaaattacctcgacgcggacagcgacaggcttcgaattctccgtggacggtcaaaaactcaacatgcctgaaggttcgattatcgcttccgttcgcgtgaaccaaaatgaaattaaatcttaccaagaaaaaatcgaaactttttcgaacggtctagcaaaagcattagatgatattcaagtcaaaaacgtcaataaaacaatggatgatttgcaaaaaatcaatgatgcgcttcaagcgaatccgaacgacgaaaaattactgagcaatcgcgatgaacttttacgtcaattagaaaaatttccaggcgtgactcgttctggtgatacgctgacaattggaggcgtggatcatcccgtcgatacacttggcacgagtacatatgtaactgatgtgaacgatttttccattccgattttcgcccaaagctctggcaaatggatcctgaatccagcaattacgagtaatgctgataataagccatttctaggtgttatcgcggcggatatcgcttccttaaaaaccgataaaaacattcaaggcacgactttcccaagttttatggacggaatcattaccgaggttgccaccgatgcgagtaaaagtagcgcaaccgcgacagcagatacccaagcattaagctcacttacggaatcaaaatcatcgctagaaggcgtcaacattgatgaagaaatgacaaatattatgcaatatcaaagttactatgtggccaatacgaaggcgatgaatacagtgaacgacatgatgaaagcactcttagccatgttataaggaggaaaatgatgcgaatttcaaccaatcaacaagcaagttcaataattaatcaattgaacaatgtctcgggaaatcttgctaaatatcaactacaagtatcttctgggaaaaagtacgaatccatgagtgaaaaccctggtgcgacagcgcaaattttatcctataatcatgtgcttagtcagctaaatcgagaaaaaacagacgtaacggaagcgaaatcactgctaaatacggccgaaacatctctttcttctatgtctacatccatgaaccgagtaaacgctttagtcttgcaagcaattaacggcacgagcgataaagacaatatgtctcaatcagccgaagaaatcaaaggactactcgatgttcttatttctgtcgctaactcagaagacgatggcagatatgtctttagtggctcaagtacaagcgtgaagccatttacaacagataaaaccactggagaaatcatctataacgggacaaccgaaaacaaaaaattccgcgtaacggacacgttagaagtagaagttttccatgatggtagcgcgatgacagacgtgtttaataacattcaaaaaattgtcgacgcaatgaaaactggcgataaagatgctttgtctgccttgcaagaaacaaatagcaaaaatatcgaaatcattactaattctatgacgaatatcggcggacagaaaaacggcgtaacagcctatgataacgtactttctagcaaaattgtcgatttttccgaacgtaaatccaatgtcgaagaagtcaatatgccagaagccgtaagtaatttaaataaaacatcaatcgcataccaagccgcactacaatccagtgtgatggtacaaaaattaagcatcctaaattatatgtgaggtgaaaccaagtgggaagttcgattgcaagcagtttaatggacccaacgcaatattattcgcagtttattagtcttcaaaaagctagtttggaaaaagcgaaaacgccttatcaaaaccaaatttctagctaccaatcacggattgacctttatgctagtttgaaaaacgctttatccgagtcgctgaaaacgatgagctctttcacgacttatgaaagtaaaaccaaactcgcgacttcatccaacgaaacgagttttactgtttcatcgacgagcagttccgtcaacggcagttattctatcgaagtccaaaacttggcgactgcagacacatacaacaaagcagtacctgatattgaggcgaaaatcggtgtaagcgggacaattaaaatcaatggcaaagaaattaaagttgatgcagatagctcaatgaaaaatgtgatgaactccatcaatagcgctggagcaaaggtgaatatctacacgctaggcgaaaatatggttgtaacttcttcaacaactggtgtcgaaaatagcattaaattcgaaggtgattcggctgttctcgatgcacttggattagttcaaaactcaccagaccatttagctgcagaagatgctaaactcagaatcaacggcgcgaccgttacaagcgcaacaaacaaagtaaccaactacatcccaggcgtgacaatcaacctgaaaaaagaaactactggcgctgaaaaactaactatccaagatcaaagtgatgaaaaagcagccagtatgattactagttttgtaaatacatacaacgcgctaacaagcacaatgaaaacctacacgggaaaaggaaccattttacaagcatctgctgccgaccttgaagcaaatcgtgcgctaaacaacgtatttcaacataaaaaagatggaaatacattattcgattttggcataagcgttgataaagaaggcgtgttaaaagtagatgaaaccgccatgaaaaaaatggtagctgaagacccaaccgccgtagaaagatttttctttggcattggtggaatcggcgacgaactatatcaatctttgaacaaaacatttggctcgactggctttatcagtgatgagacgacctcgatgacgaatgaaatcaataaattaaatttaaagttaaccgatattactagccgaaatgacacgttattaacgaatattacggatcaatacaacaaatggcttgaaatgatgcaagcgatgcaaagcgacgccatgacacttgatgcactaattgacggtatgaatagttctaataaataaaaatggtaggtgaaaaaaatgcaagcttggaaacgatacacacaaaatgaattaaatacgagcaaccccattaaaaacaccatttatatatacgaacgttgtattattgaatttaaaaaattagacaaagcactcgcagaactacatttttcagaagccgatcttattcttgataaaatggaaaaaatctttgaagaattaaaattacaattaaatccagaagccggacaagaactttacgataacatttttggcttatacgaatggatttctgaacaaattcgccaaatgcaactactaaaacaacccgttaatattgataccatcattcacgttatcacgcagcttaaagaaggctacgagggagtgatgaaacatgaatcaagcaaagacacatttggctgaacttaaagcactgtttcactcaacgggacaattgaacgtttccctcgaagaataccaagcgaaactaaatgaactcctaaaaagcactgaacatttaccgaaagagacaaaagaagccattttaaaagaaacaagggatgtaattaataaaggtattcttttcacccaaaaacaattagaatccactgaaaatgccttttctgaaaataaaagtcgcaatgctgctaacttgaattatgcgaaatttttctaaaagaaagaaggaaatgaaaagtggaaaattacaccacgcatattggcaactacttgaattatcttcaaacagccaaccaagtagtttcaaataatatcgccaatgccaatacgcccaattttaaagcaagtgaagctagtttcgaggaatcacttggctcgagtttgcgagcatccggtcagaatagcgctgagtcggcaggaaacctaacgaaaacaaacacaaaacatttagctggaaccgacatagacgaaacaaatgcaaaagtgaccactaaaagcggatccatcaacgaagatggcaacaatgtcaacgtcacttctgaaatgatcagcttaactaaaaataatcaaatgtacgcgctcgctatcagtgcactcaactataattcatccatcaacacagcagcccgtggaaagtaaggtgaacaaccatgtttgaaggaataaacacaagcggctctgcgttaaatgctgcgaaacaatggatggaagtaagctccaataatatcgcgaatgctgattcaagcgccgcgcctggcgaaacacctttcctcagaaaacgcgtcgtcctatccgaaatcacgccgttcgaaacagctttaacaggaacaaaaggtgttaaagtaagcgaaatatcgagcgatacaggaagcgtcaaacgggtatatgatccaacccatccaaatgctaatgaagcgggttacgtcaattacgcgaatgtagatatgacagcagaaatgaccaatctgatggttgggcaaaaaatgtacgctgcaaacacttctgccttacaagcaaatgaaaaaatgatggaaaaagatttagaaatcggcaaagtataaaggagtgttttaagaaatggcaattgaaagtattaatgcagccagcgtcttacctaaagtaacacttggtgaaaccgcgaaaacagacaatgcggcaggtgccggaaataccttcacgcaaatgctggatagtatgagtgatacacaatcaaacgcgcaaacttccgtatcaaaccttttaacaactggcgaaggaaatgcgagtgatgtactcattcaaatgaaaaaagcagaatcagaaatgaaaactgctgcggtcattcgtgataatgtaatcgaaagctacaaacagcttttaaatatgcaagtgtagcggttagactagtcgggggagttttagtcaatcgtccacacgagaaaaatggagcgaagtttttaagatggcaaaaataaaaacaatgtattcgaaattgaagaattggcacaaaggcgcgattttagtcggcctttttgtcgtagtcacggtgttattactctacatgaacacgcccaaaacagaagttacactttataaaaatttatccgaaacgagccagcaacaagtcaccgatcaattagccaaaatgggcgttgattataccgtcgacaaaagcggcaacattttagtcgatgaaaaagtggagacactcgttcgcgacaaattcgcagacctaggtatcccatacacaggccaagatggcaatgatattctactaaacagctcgctaggagctagtgaagaagataaaaaaatgcaagaaaaagttggcacaaaagtcaatttagaaaaagaaatcgttcaaagttatggaacaactatagacagcgcctccgttcagctaacattaccagaatcgagttcgatttttgaagaagcgagccaaaaaggaaccgctgcagtaacactcaaaaccaaaaataatcaaacactaacaagcgaacaagttctcggcattcagcgcaccgtcagcgcagccgtaccaaacgttgctagcgatgacgtagcgattatcgatacgaaaaatggcgttatctcagaagcagacacatccaaagaagaaggaagctcggcctataaaaatgaagtcgacatccaaaacgccatcggaaaaaatgtaaaaacagacatcgaaggtacactttccagcatttttgccctagataatttccgtgtgaatacaaatgtcgcagttaattttgacgaaatcaaacaaaatacggaacattatccaaacgacggaaaagtacgtagtaaccaaaaagatacatcaacagacacatcaaaaggttccgcaaacacaaccgaatctggaaccgcatcaaatgctgacgtaccaaattacacggaacaaaatggtgacgatacgaacacctatacaagcgaaaaatcaagtgaaacaacgaattatgaactagactccactatccaagaaatcaaaaaacacccagcccttgcaaaaacaaatgtcgttgtctgggttgatcaaaatgctttaaataaaaacggtgtggacatggcagaatttacaaaagcaattggtgtttcagctggattaacgcccaatatgactaccgaagaagcgggcgcggacggagaagccgcagccgcaccaacattcgaaggtactttccaaaatggcgatgtcaccatcatgcctatccagttcttagataacgcgaccccagcagaaaaagacacgacagaaaaagctgaaccagcaagcaaagcctggatttggtggcttgcaggcggtttactcttcgccgtcatcgcagcaggaattatcacctatatcatccttcttaaacgtaaagaacaactagaagaagcattggaaccagaagaaaaagattacattccagccgaagaagcaatcatcaatccagaagaacatccagatttcaacttccaaacagacgcattcgatttatcagaaccagaattaaaagctcgcaaagaaagcttgaaaaataaactcggtgaaatggccaaagaagacccagggcgcgccgcagcagtcatccaaaaatggctcaatgaaaggcaggaatgacaatggcagaaacactcaaagaaaccttagaagaaacaaatgctgaattagaaactgtcgaagtagtagaaacggaagaaaaaactactacttcagcagattcaggtatttcaagacgtgaaaaagccgcgcttattatttggagccttgatgaacaaatcgcgaccgaagtggttgatttgctccctgatgcatccaaacaacgccttgcacgagaaatggccaaaatgaaagaaatggacggcggcgcagtggaagaagcgactagagaatttttaggagaactagaacttctttctggaggaattgctaaactcgaccgcgaacatttacaacgcttgttcccagacatgacgacggaagaactaaatcaactcatttacggggtagaagcagaatcacgtatcggcgaaaccgcgctagatattctacgcgaaattgatgatgttgactccttgtttacaattattagcgacgaatcgccacaaaccatcgcgatgatagcctcttacatgaaaccagaagaagcatcgaaactactagcattactaccggaagaaaaaatgattaacaccgtcattggtatcgcgagcctagaacaattcgatagcgaagtcatgcaaaacgtttctaacttactaagaattaagctcgacacaatgtcgaatagctcactgaacaaaacagacggcattaaaaatgtcgcaaatatcttaaacaacgttacccgcggtttagaacgaacaattttcgaacatctcgacgccgaacaagcagaactttccgaacgcatcaaagagaaaatgtttatgtttgaagatattattctgcttgataacatgaccttgcaacaagttctggccgaaattcaagacaacaataaaatcgctcgagcacttaaaaatgaaaaagaagaactcaaagaaaaaatcctatcttgcgtatcgaaaaaccgtcgcgatatgattaccgaagaactagaagtccttggcccaatcagactttccgatgttgagcaagcccaacaagatatcgccaatgtcgttaaaaatctagaaaaagacggcaaaatagttatccaacggggggaacaggatgtccttatctaatccgcgaatcccaaaaggtaaagtcactttatccgacgtgaaaatggaactgttttatttagatgatatagaagaaacagaagaaatcgagtcaccatattcgaaagaacttgaacaactagaaagtcatcaaaaagaactcgaaaaacatctatctgccattgaaatagaacaacaaaaattagctaatgaaaaagcggcacttcaagcagaacgccaagccattgaggagttaagacgagacgctgaagctgaaatcgaagcaaacaaacaagcttttgaaaaagaaaaaacacaaatttacctaactatcaccgatttcctttgggatgaaagtattgatctcgcagaaagaatcgtccaccaagcaatcgatacccgccaaattgaagtcttacctatgctaacagaagtcatccaaaaactcccagttgctttcgacaaactaaacgtcaccacccacccagaaacattaaaagccctaaaagaagaaaacacaggcacaaaatacgactggcttttagaaaacatccattggaacttcgatatgcgactggattacggcgaatttactgtagaagaagaaaaagaatacttcgactaccgcatcaccgaaatttttcaaacacttcacaaacaaaatgccgaacggaaaattctaggaggcgataaaccgtgagctggtcgccaaaaaccgaagcttggcaagaattaaaaaacaccgtcccatacatccaaaaagggaaaatccacacagtccaagaacaagtctatatttctaaaggccctcaagtgaaaattggtgacactgtcatggtcggtgaaaacaaagtactctgcgaagtaatctccatcgaaaaagaaaataatatgctgctcccgtttaatcaaagcgacaaagtggcatacggtgattgggtgtacgtaacggatacgaaaatcacgattccggccgacgaattcctcctcggaaaagtactcaacgcatccggcgacattttaaacgaagaagctggtatggctaaattcaaacaaaaaatgccacttgaagctccaccaattcatgcttttagcagagcagaaatcactgatacgctcgaaacaggcatcaaagcaattgacgggatgttaacgattggaatcggtcaaaaaattggtattttcgccggatcgggtgttgggaaatctactttacttggaatgattgctcgtaacgccaaagcagacattaatgtgattggtttagtcggcgagcgtggccgtgaagtaaaagatttcttgcgtaaggatcttggagaagacggactgcgcaaaagcgtgattgttgctgctacctcggacgaaagccatcttatgcaactacgcgccgccaaactagccacttctattgccgagcatttccgcgaccaaggaaaaaccgtccttctaatgatggattctgtcactcgttttgctgatgcaagaagaagcgtcgatatcgccgtcaaagacttaccaatcggtggaaaaactttgctaatggaatcttatatgaagaaattgctagaacgttcaggtaaaacacaaaacggctcgattactggtatttatactgtgcttgttgatggagatgatatgaatggtccagtccccgatttagcgcgggggattttagatggacatatcgttctcacccgtgaactcgccaccaaaaaccactatcctgccattgatgtccttggctccgttagtcgggtaatggaagaaatcgttccagaaaaccagtggaaaactgcttcgaaaattcgcgaatggatgagtatttatcaagaaaatgaactatatttcaaacttggtacaatcgaacagacgagcgacaacgcggcgatttttacaagtaaagaaaagtcctattttatccatcaatttttaaagcaattgcgggatgaaagtgttacgctcgaagaaacgagtaagttgatggaaacgttagtataacaaaggagtgccgtggatgaatccagtagaacaagtaataagtgctagacaagccgagtttcaaagcgtgttcgaagcagcgaaacaatcggctaccacttttgaaacaaaattaaacgaacgcttaaatgagaccacaactgccaaaacaactagtgtacaaactgtcacagatgccgaacttgcacgagctcgagaagcatatgaagcattaatcaatcaatctgaaaccaattctgccgcgcctacttcaagcacaactaccgagactcccaccgcatcaacaggcgaattaacaaactggaacaactaccaaatcaaaccaatcagtgcggaaaatgaagggaaatatagtgatttaatcaaaactgctgccactaaatatggcgttccagaagcgctcatcaaacgagtcatccaagtagaatccaattttaacccgaatgttgtatcaagtgctggtgcgacaggcttaatgcaactgatgtacggctcgaaccgcacggacccagcaaccaatatcgacgctggaacaaaacaactggctagttacatcaaaaaatacgatggcgatctaaaactagctttagcagcttataatgccggaccaggtaatgtccacaaatacggcggcgttccaccattcaaagaaacacaaaactatttaacgaaaattattgggtaagggagaataaaccatgggaaactggcaacaaaagtgggaatcatggcgcgatatgactgcagcaatgcaacaagaaatcaaaatcgaagcggccgaaaaagtgacttcctacataaaaaatgaccaatttgaagaagcaattaacgtcatcagacaaaccgaaaatctcctaaatgaacttgactttgaaacaaaaatgaatcgcgtcgaagaacagctccaagccttcacatctgaccaagaagcagctaaatcatttgaagcaagccaacttcaaaacatagaaaaaccaagcacaaaagtaagcttcgacctatcacatgtaaaatcagaagcaatcaatcagttcaccaaacgcgatttcaacctagtagactcaaatgatacccacatgcaattcctcaaaggcaatcgaaatttttatatggacattttcaatcccgaagaaagcgaagaataccactacgctaatcttgatgagaaatgccaatacaaaaacatcggcttcatttgccaaaacgatgcagcagctgaaatcgcaacaaaattaacaaacgaatggctcgaaactttagaagctccgaaaaagaaatttttaacggttaacattgctaatttaaacgcgatgaaacaaaatccagaagtactttttcaatagaaaaaatcctgttctcgccaaaaagagaacaggattttttatgcaaacaggttgacatcaaacctactttgtattactatatacttgtacctagtaacaactagtagaggagtgaattcaaatgaaaggacttaccgagttactcaaaggtagtttagaaggaatgattttggagcgaatttctagaggagaaacatacggctacgaaatcaccaaatacctcaatgacctaggttttgatgaaatcgttgaagggacggtctacaccattctcgttcgtctggagaaaaaaggattagtcgagatagaaaagaaaaaatcagaattaggtccaccacgaaaattttacacattgagcccagctggtgaagaagaattagctattttttggaagcgctgggattttattcaaggaaaaatcatgcaagttaaaggagggcaagcgtaatgtttaattggtacaaaaaataccgcgaagaaaaacgagattataaacagtacaaaaaacgaatagccgctttgccagaagattataaaaccgcaatgaaagctatcgaaacctatttatggaactttgcaaaaggtgctgggatgtttgaaatcctaaagaatgtactcgagatgttcgaaaacgccgccgccgacaacctagaattaaaagccgttgtaggagatgacctagcggaattcgccgacaacttactaagtgaatttccggaagaaacatggatggataaacaacgtcagaaattgcgagattcgattaaataaaaaaacagaaagcctctcaaaaaaaatgagagactttctgtttttttatttacgtttcttaacaacctctataaattcatctaaggtttcatgggcttttatttgctcattacaaacatcgctatcgtagcaaatgtaattaccatttgtcgtataaacgccatcactcgaagattttgtttttgccataaagagcgatactttcgaatgcgaatggcaaatcgagcaaacccccttttgaatctctgtagaaatagttccttgtacgccgaccaaatttccatcctcgtaagtcacgatatacttacgttgctgagcgatatcattccagccgtaaaatgtataatcgcgcaaatccagtttagaccaggcgggaatttttaattttttcgttttcgcaaaaagttttttaagtttcacatcactaggcggcgcgaaaggaatcacataggcttttaacccctctaaaaacggctctgcttctttggttgaagtaatcacatggagcttgctaaacagttccttatgctcctctagtacactttccggaaatagttcattgattttctcctccgttaacgattttaacgccttcaaagtcgaagtatcattggcagaacggtatgcgcgtgaaacattggctaattgatttttgataaaattatattggtatggctcgataaactctttcattataattctcctttaatagtttaatgttggttaaactagctgaaggattgaagagtttatttcactcttactttctaaacaatcctaaagccattgttagaaagtcgagagcagtgcaattttgtttgcatctctttgatcaccaccttgccttcattataagcacttctgaattgttcgtcaattctcttttatgaatactcttctaaaaacagggtaaacgaaaactattggacattagagaaaacatccatgggaggagaaagtaaaatgaaaaaagtaaaagcaagtgaaacactcgtacaaacattaaaaaattggggtatcgaccacgtatatggcttgcccggcgattcgattgacaccgtagttgacgctttacgaaaagaacaagaagcaatcgaatttattcacgttcggcacgaagaagtggcgacactagccgcagcagcatataccaaattaacaggcaaaattggtgtcgcattatctatcggtggtcctggagcaatccatcttctaaacggaatgtatgacgcgaaaatggaccacgtgccaatgctcgtgctcgctggacaagtgacaaccgacgtcttaaacaccggctttttccaagaagtcaatttaccagcgattttcgaagatgttgccgtgtataataaacaaattgataatgccgaaacactcgcggatgtggttgatgaagcaattcgcaccgcttataaagaaaaaggcgtcgccgtcttaacgattccaaacgatattccgtcgcaagtaattaaagcgagcctcgaagcaaaaccagtgaaatttgaacaagaaaatccaaaactagatgaagcggcaatacaggaagccgtaacactgattgagaaagcggaaaaaccagttatcttagcagggttagggactaaacacgctggaccagaattaatcgccttctcggaaaaattgaaaatcccgattattcattccttaccagcaaaaacgattgttccagatgaccatccaaatgcactcggaaaccttggtaaaatcggaaccaaacctgcatatgaagccatgcaagaaaccgacttactattaatgtttgggaatgattacccttatagcgactatttaccaaaaaaaacagactgtatccaaatcgatattgacccagccaaaatcagcaaacgtttccccgcaatagttggtttagtaggcgatgccgcagaaataattagcgatttaacagccaaaatagcacctgtagaagaacgtaaattccttcaagcatgccaagaaaacatgcaagaatggtggaaatggttagaagaagacatcgcacaaacaagcgatccaatcgctccagaagtcgtgatggcgaatatccaaaaaatcgcggacaaagatgccgttttctctatcgacgtaggaactgcgactgtttggagcactcgttatttacatttaacgccagaaaatgactttatcgtttccgcatggcttggtactatgggctgcggtttgccaggagctatcgctgccaaaaaagcattcccagaccgccaagcaatcgccatcgttggtgatggaggattttccatggtcatgcaagatttcgtcacagcagtaggcctaaacatgccaatgattgtcgttgtgctaaacaaccaacaactttcattcattaaatacgaacaacaatcagctggtgaactaaactacgccatcgacctaccagatattaattacgcaaaatttgccgaaagttgcggaggaattggtttccgggtagaaaaaatggcagacctagaagctgctttcgaaaatgctaaactagcaactaaaccagtaatcatcgacgtttccgtagatagcgcagccgctccactacctggtaaaatcgtgatggacgaagcactcggttatactaaatttgaaatccaatcagtcttagaagaccatcgtttcgcaaaaatgccaccacttaaaaccattttgcgcagatttttataaaaaataaataaaaaaataacaacatcacccgttttatgccgatattcactaattatcataacgtttttttattaaaactaattattttacaataaaatatggagtttttttaaaaaatatgagataatgaactagaattagagaataggagtgtggaatgggtgaatttaattaaaaatcgtaaattgaaaacaaaattaagcatcaatattgttataacgaccatcatgttaatcggacttggcgcgactagtttcctaggttttcgtcatgtagcaacactttcagataatatggttgataataatgtcgcaccaatgaaagaaatcgcaaaaatccaaacaaacatggcgcaaatcaatatcgacatcctgaccatgttcgacactatcaacggaaaatcaacccttatcaaagatatcgataatctgtacgccgaaaatgaccaagcaatccataatttcaaaaaagccaatttaacagcagaagataagaaacaattagcttactttgaagaaaaactagcagatatgaaagcatccgcatcctctgtaatcagtgacacatcaagtgcgctagacgatgcagaactacttggagcacaaaacagatactaccaaaacgtcaaaacaaaatttgacgatgcaacgaaacaattaaacgttttaaatgacatgaactataaagaagtcgaaaattcctcacaagcaatttctgactttggcgtaaaaatcagcttaattttcacagcagttattatcgccgtgctaatttccttattcattttcaacgcctatattacgagagttattctaaaaggaattcgtcatctgcaaacagccgtacataaagtagcgagtggcgacctatcataccgcagcacttacaatggtagagatgaactgggcgatattactaacgacttgaacgaaatgagcgaaaacctacgcctaatgattgaagacgttaaaaaagcgtccacagatgtgaaatcttcgagcgacaacgtgattattagctctgaaattatttccgcgatgacaaccgaaatggacatcgaaatgaaaatgatgggcgaacaaatccaaacccaaatcggtagcatgaaagaaagtacggatgcgatggatcaaatgacaggcggcgttcaaaacgtggctgaatatgcccttaaagtatcagacttaacaaaagactccgcagaaaaaaccaacgacgggattgccgttattaataacctagtatcacaaatggaccgcatcagcggcgttatgcgttcaagcacagacgttgtttcccaactagttaaccgcgttggcgaagttgaaaaagcgctagataccgttacgaatatcgctgaccaaactaatttactggccctaaacgcagccatcgaatctgcgcgcgccggcgaacatggccgtggtttcgcagtcgtagccgaagaagtccggaagcttgcggaacaatcacgtcttgctgttgttgacattaatactgttctgaaaaaaatccaaacagaatcaaaaacaacaatcgaagtaatgaacacaggtctttccgaatccgaagcaggccaaaaaatcatttccgaaacagaagcaactttcacagacttactcaaccgtgtcaatgatatatccgcccaaatgcaaaatgtatctcaagaaacggaagaaatggctgcgggaattgaagaagtcaacacatcaattagcgacgtaacagaaatatccaaccaaatcggtgaaaaatccactgccgcacttgaattcgcagaagtaaacaaaatgaaagtagacgagctagtcgttatctccgaagaaatgcaaaaaatctccggttcattagaagggtatatcgccaacttcaataccgaagtgagcgaagaagcggtcgaagtaacagaagagccagaatcagaaacaaaagacccgggagaaccagtcctagctgaaaatgtctaggaagcatgtataatgcgaatttggataaaatcactgcttgtcattacagcatgtatatttagtttgacccttctaaatacgaaatataccttttattcaccaaccgtcaaactcgaaagcgccaaagtcgtttataaattaaacaatgaaccttttaatgtaagattagatgtaccgctagtgaatcaaatggatgctccgacgctttttaacggctgtgaagtaacaagcctagcaatgctcttacagttcaatggaaagcgcgtaacgaaaaatgagttagcaaataatctctcgacaacgccaatcgaacaaaatggtttacacggtaatccagataaggcgttcgtcggtagtattagcggcgatagccctggtcttggcgtgaatcatgctccaattgctaaactagctgctaaatacgttaacgaggcacacgtccacgatattagcgggaatagcattcaagacatcattaccgtactaagcacaggtgcgccggtttggattatcactactaccgactatcatgcaccgaaaaattggcaaaccgtgcaaacaaaagaaggcaaaaagaaaattacgtattcgatgcatagtgtcattatcactgggtttgataaaaataatttttatattaatgatccatatggacataaaaatcgtgccgtaaaaagaagtgtcctagaagaaggctggtctgctatgggaaagcaagccatttacctaagtcgtccataaaaaaatcgtttgaaagcatatctcatgctctcaaacgattttttatattttcttcttaataaatagtacaacagcaagcgcgacaagtaccactccaataacaatcggccaaaccgaaaacgcatctccggtagaaggtagaagggaagcgctacttgtattttcaaatgcgacagccgtgcttactcggaaataaatgaatccaagtgaaatgaaaacagcaatactagcaactaattttttgggaaaaaccattcagctcgctcctttttatatcatagctatattattaggcatttgttattttttgtcaatgtatagaccaattttaatcaaatggctatatataatgcttgacctagtatacatattattgtaaaatgaatttgtttccttgaaaagtagtgaaggaggatcgtacaattgaatagaagcgccagaactgattgggacgaaaatgcttgaaggtgaaatccctgaaaagtatcgatcagttgacgaggaggagattaatcgaagtttcggcgggagtctcccggctgtgcatgcagtcgttaagtcttacttacaaatcatttgggtgaccaagtggacagagtagtaatgaaatatgctttttaccctccaaggaaaccaaaaaatgtagagggcttgaaattggataagtctgccctcaagttgattattggaggaattttattatgtgtggaatcgttggatatataggaacaaataatgcaaaaggcattttattagaaggacttgaaaaattagaataccgcggctatgattctgcaggaatcgctttgcaaaacaaagaacttgtaacagttgtcaaagaaaaaggacggattgcagaccttgcgagccttgtaccaagtgatgcattcggtacaacgggaatcgggcatacacgctgggcaacacacggtaaaccgaatcacgaaaacgcccacccgcaccaaagtaaatcaggtcgttttacaattgttcataacggcgtaatcgaaaactacacccttttaaaagaagaatacttaaaaaaccattcttttgtcagtgacacagatacagaagtaatcgttcagcttatcgaactctttgcagcagaactttctactaaagaagcattcaaaaaggcgttatcgttactgcacggttcttacgcaatctgcttaatcgaccaaaccaatacagaaacgctttacgcagcaaaaaataaaagtccattactaatcggaaaaggcgaaaacttcaatgttatcgcaagtgatgctatggctgtccttaaagagacagacgaattcgtggaaattatggataaagaaatcgtcatcgtaacaaaagatggcttcactttagaaacactagaaggtgaagaaatcactcgtgcaagctacaaagcggaactagatgcatcagacatcgaaaaaggcacatacccgcactatatgttaaaagaaatcgacgaacaaccagctgtaacacgtaaaatcattcaagcctatcaagatgaagctggcgaaatcaatgtcgacaaaactatcattgacgaaattttatcatctgaccgcattcatatcgttgcttgtgggacaagttatcatgctggtttagtcggaaaaaatttaatcgaaaaaatggcgaaaattcctgtagaagtacacgtatccagtgaatttgcttacaatttgccattaatgtctaaaaaaccgctatttatttttattacgcaaagtggcgaaactgccgacagtcgtcaatgtcttgttaaagtgaaagaacttggctaccgcacattaaccttaacaaacgtaccaggctcgacgctagaccgtgaagcagatcattcgatgtatttatacgcaggcccagaaatcgctgtagcttcaacaaaagcctatacagctcaaatttccgtattggcagtacttgcagtttcccttggtcgcgaaattggtgacgaagaagcacttaacattaatttagctgctgaactaggaattgtcgcaacagcaatggaagccatggtctctagcaaagaagtgattgagcacatcgctggcgaatacttagcaacttctcgtaacgctttcttcctaggtagaaatatcgattatttcgtagcaatggaagctgctcttaaactaaaagaaatctcttatattcaagctgaaggttttgcaagtggcgaattaaaacatggtacaatcgcgcttatcgaagacgggacaccagttttagcgcttataacgcaagaatctatcaactggaatattcgcggaaatgtcaacgaagtattagcgcgtggagcaaaaacttgtatattcgcaatggaaaacgtcgcacaaccaggtgaccgctttgtcattccacaagtgcatccgctattaacaccactggctagcgtcatcccatgccaactactagcttattacgccgcacttcaccgtgattgcgacgtcgacaaaccaagaaacttagcaaaaagtgtgacagtagaataaattttttcaagaccttttcgaaactagaaaaggtcttttttatgcaatcaataaatttgcacgagccccttgttatgctttaaacttaaagaggaatgggggaaatcagccaatggaagtatcgcatgtaacgctcgcaccaaataaagatagtcgtgccgcagttttaacaatcggcaaattcgatggggtacatatcggccatcagaccattttaaatacagccttatccataaaaaaagaaaatgaaatattaaccgctatcagtttcagcccacacccactttgggctttaaaacaaatcgaaatatatcgtgaaatgctcacaccaagaatggaaaaagaacgctggctcgcgtattacggtgtcaatcatttaatcgagacagaatttacatctaggtacgcagaaacgacaccggaagaatttgtcacagatcatttgaccaacttgaatttatcgcatattgttgttggttccgaatttaattttgggaaagggcgcgactctgacgtagatttactccgggacctatgcaagccctatgatattggtgtcacatctgtcccggttattgaaacaaatcaaaccaaaataagttccaccaacattcgagcgtttattcggcgcggtcattttcaagaagcggaagagctcttaggccatccgtggtatattactggaattgtagaaaatggtgagatgactggcttagatgattacgttctcccggcaacaggtacgtatcaaacagactcaggaatagtgaacgtaacgaacaatcgcaccatcgaagtcggattgtcagatggacttcaacaattacatatgaaaaacgaactttccgagtaattaggaaagtttttctttacattttataaaattagtaatatactaatttagtaaattactaaaatttaaaaggagaaatctcatgaagattccaactaccttaaaacataaaccagtaatcgttgttgaaaattatgaagaagtagatggcaagaacgcttaccattctgatgcgaaaggactttcgctcggacttgcacagtggaatgatcgaggtaaagtagatatttcagccaaagtatggcgtcatactggtgataaatggtcacgccaatccgaagaacttccgctacaccgtgtgcttgatttggccattttaattgctagaaccaaagtccatttcaaagatgcttaccgtttacctcatttttatgacaaagaaaatcccacgcttgatcgcatcggtttgcaaggagatgcgctgactattgctgtttgtgaagataacgaatatatcgatgaggacatgcaattgttcgaacaagctttaaaaaacgacgatgaactcctcagcgaacgcctcaaaacattaagcaaactattacaagaagcaggttattaaggacgtgaaataaatgaataaagacaatcgtaaagaactaattcgtgcatacaaagaaaaatctcccgatgccggcgtttaccgttttatcagtacaaaaagtggtaaatccttaattgataacacaatggatttaaaaggaatcgccaataaacttgctttcggagtgaaaattggagcgggaaatatgctaccaccagaaatggcaaaagaagcaaaggaacatggtattgacaccattcaatttgaaattcttgaaaaagtagatattaagcccgaaatgacaaaagaagatattaaagaagaaaatgatgtactccttagtttatggctagaacgtgaagatatctgagacctttcacttgaaaggtctttttttattaaaattgtacaataaaaagataattgcaataaaatacacgaaatgtctacattttctagcaaaattaatgttatactaataaatgactattttaaaagggaggtttatatcataatgaatccaagaaaatcagaatttgttctaacattaattgcgggaattacaggtattattgctggtattactggaatcgcgggcggaggtctacttgctgctctttctggcagtgaagaattatctaacgcaactgcgatgactgctgctgactctgaagcacttgctgctgcaggtggtttaacagtaattttctctataattgctttagtgcttggtattgctttgattgtttttgctgtattaattaaacgcaatgctaaagtatttggtatcttgacgctagtagctggtgttgtaggtttcttcttagtaggattactatggatcgttccaggtgtacttgctgttattgcaggtattatgtgcctagcgagaaaagtaccaactgacacatttagctaatcttaatgctagactgtaataggatgagccatcattctgttgcagtttttttgatttaaatagttcacaaaagataataaatttattttaaagtaaaaccgacaatttattttgtcggtttttttgtggttattatataactctatttcttcaaacaaatagagcagatgtgaaaagtactatttctactattttcaatattcatcagtcaataatagtatgatttcacattattcgagtgctaaaattagacttcattagctgtgtccggctgttatattgtgacgtttttttgacaaaattgtaaaaatggataaaagtgcaactttatctaaaaacgaggttgaattcaggtggatttcgatgatttgggatgttttgaaaatgttggaattatcttttgaaacgcttttttttgagttgtattttaattggaaataagtaatatcaattactttcgtgtttttgaatctttgctaattagattttttatagtaaattattttcgtttttattcgtgaaaatgtgtcaaaaataattacttgaaaatggaatgaaatactgtttttgtgatataaaacgttcaaaaaatgttcataaataggaaatttcgctacatagaaaggtattttcaaaaggctttttagcgtatagttttagtggtaataaatattactggaggttatacacgaatgaaaaaagcatttctatgcctatctgcaattgttctatcattaaattttgtatggattaatccaattactgggtcagcatccaaaatcgaaacaacaaaggaaacaaaccaacaagttaatttgaaaaataatgtaacggatatagttacttcggaagatttaggaggacaaacgtggttaattaatgaggtaaacagacaattagcaccaaaaacggtcgacgtaaatttaacatttgaagatttggctaaaattacgaccatttcattgaataatagatcgcttactggggaagtaccaccagagattaaaaatttagtatcgcttcaaagactgtatttattttctaataagttatcaggagaaatccctgctgaattaggagaattaacgaaattaacggagcttcgtttagattataatgaactatcaggaaaaattcccgacggtctaggtaatatttccgaaatcgcactgcaaaataatcgtttggttgggcaaatacctttaagtctctatgaaaatagaactggcaaaaatgaagtgaatgtttcgggaaatcaagtgacgattaacagtcaacaatcagagccaagtgtttattcagcctatacgtttgtctatccaagttctacacctgagtatagcggacatattaaagcaaataattcttttatttctaatctaactaatgatatgaatcttacaccgtttttaaaaaacagccctacatttattaatctacaagtagtatatatgtttaactcggaattgtttgatgggcatgatgtgacgattaccgatacgaatgatggcagggtgctttatgacgggacgctgacgtcggatattagcataccgttaacaaattttaaatcaggcgtacatgtgattaatgtgatgcttgataatgcgcccaataatcctcaaaatcaaactactttcttaatcgatattttacctgtcccggctcatgatttgacggtgaattatgtggacgaagcaggagcagaaatccatgaaccacaaacggtaagtggaaatgtgggtgatgattatgatgtaacaacaccagaatttgaactagcaattgacaaatatgaattagatacggagcaaatgccgacaaatggacttggtacacttagttcagaggctcaaacagtcacttatgtatacaaaaaagtgaacggcgcgcctgtcaccgtgaaatacgaggaccaaaatggggtagagataactacttccgatgtgctaacaggtaagctagatgctacgtatcaatcaaaagcgaaagaaattgctggatttacattagataacagtaaactaccagccaatgcaagcggcattttcgaaacaaatccacaaacagtcacttatgtgtatcaagccgttccagccacaattaaagcgcatgattccacgatttatgtagaggataaatggagcgcagaggataattttgatagcgcagtaaattctgttggagctgcagtttcctttgatgatttagaagtagaagggacagtggatacgacgaaagcaggtgtttatccagttacttatagttttgccggagaatctgtgactattaacgtaaccgtaaaagcaaaagaccttccagcaccaccagtgacaccgacaaaaccagtggttcctatccaaccaactaatccagaccaaccagacattcaagcggcaccaggtgaacatcaggcttccactgataaatcagaagcattaaaagtaaccgtggcacaaaaggaacaacctacagtagcagggaatttaaaactgccaactactggggataatctttgggacagtgtgctgtatagtgtttttggtttaatagcggtatgtgtcgcatttagtttattcttctggcgtaaaaagcaaaagcatagctgaaatatattagaactaggctgcctattttagaagggtaatgtgcaaaagagataccaactaaaaacggcataatagcaaaaaataactttacgtcatattctgaattaaagaaagcaaaataatattgttattattgaatggtactctggatgtgatagtaaataaaaaaattttccaagaacaattgtttattcttggaaatttcttcggtaatataccaaacagcatatcgtggctataaagtttgaatgttaatatgcgttgcttgtagcaatggacgggttctcatacaatagtgataacaactgaaagaaaggcggttatctctaatgttaaacgaaaatattaaagcaatcagaaaatcaaaaggactttcgcaagaagaaattgccatcaaactgaatgtggtgcgacaaacaatctctaaatgggagcaaggactgtcagttcctgattccgatatgttaatctccatatcggaagtgcttgaaacaccagtaagcactttgcttggagaaactgttatggtttcaaaggttgatgatgtaaaagcaatttccgaaaaactggagattataaacttacagtttgctcaaagaaagaccgccagacgaaaaatgctttattggctatttgtctcgttgtgtgccgttatagcaataatttctgcggtctttataatactaaatagtccttacttaggttgggattatagtgatcctgaaactagcgttatcggagtagcttttcatacatttgaatggttgtttgtcagattagcaccgattatccttataggaggagtcgttggaatttttctaacgcggaagaacgtataaaatcgtactatgtttgatgcttttggggatgagtcaggcttcaaaattactgtttgcaaaaaggaactgtaattttgaagtctgatgtgattaaaaataattagtatcgagtataacttaatcaagctttagcaaaaaatggacagcctatttttatttaaattgagtcttttaaagataattcaacgggaacaatctctgtaatgcgtttcttttgcttaggatttttaataatagtaattaaattatctacggttatttgagcgattttaggaatattttgtttcacgctactcaatttgggaacagtgtaattgcactgcggggtatcatcgaatccgattactttaatgtcatttggtattttttttccgatagttggcaagaggttcaatagctcaagcgcgatattatcattaatcgcaaaaataccatccattgttgttacttcattgacaaaggtaataatgcttttttgataatcgtgtatttgtaaatctactgtaaatttggaaacgtcagggtcgtagcgaatattatttttctttaaggcgtcttgaaaacctttgagacgttctttagctgaagacgattgcctgctatgcataaatataacaggggatttcactccggcatgaattaatgcttccgtagcttcaaaagctccttggtagtgatttgatgaaatgaaaattgtatcttttttatcttttggttggcggtcaatacatacataaggaataccattttcggcgttggtatatttaaagccaaattcatctgcgcctgaaataacaatcaacccatccaccattttgctctctaacatgtttaaatatgccatttctttatctaaattacggcctgtattacaaataatagtagagtagccttgatcgaataaaatagcttcaatttgctgaacaacgctagagaaaaaatagttgctaatatccggaactaaaattccgacagaaaaagatttattcatgcgtaagctttttgcgctaaaattcatttggtagttggtttctttaataacagccagcactttttcccgtgtttcttctgaaaagcggccattatcattgatgacacgagatacagttgcaacggagacgccacttaatttagcgatatcttttatggatgtttttttcatagtatcctccttctatgagtaaacgtttttatttattactctattttcgcacattaatcatatattatcaaatagggaaattttaaataaaatattgacacgatttgagaaaggtgatatatttaacttgaaaaaggtaaaacgattactcatattagtcttattttttatttgtttaatgagtaatcgttatctcaaaggagtggaaaattgatgagcaaaaaactgatttgtccttctatgatgtgtgctgatttttctggcctagaaagggaagtggaagaattagacaaagctggaagcgatgtttttcatgttgatattatggacggcgcttttgtaccaagctttggtatggggttacaagattttgaagaaattcgtcaaaaaactcaaaagttagttgacgtccatttgatgatcatgaatccaggtgattatgtggaaatgtttgctgataaaggtgcagatattatttacattcatccagaagctgatttacatccagctagaacattagacaaaatccgaaataaggggaagaaagttggtattgcgattaatccgggaacggcgattgcaacaattaaagaacttttaccattagttgataatgtgatggtgatgacagttaatccaggttttgcaggacaaaaatatttggactatgtagatgtgaaaatcgcagaacttgtcgaattgaaaaaggattatacttttgaaattatggtggatggggcaatatctccagaaaaaatcagcaaactttctcagttaggtgttaaggggtttgtgctaggaacatccgcattattcggaaaaaaagaaagttatgctgaaataatcaaaaagttaaaacaagaaaagatggaggaattacgatgaaaattgctattggaaatgatcatgttggaatcgagcttaagccagttattgttgcgtatttacaggatttaggtcatgaagtagatgattttggtgctttctcaaatgaacgaactgattatcctgaatatggtaaaaaagttgcagaaagtgtagcggcgggaaaatcggacttaggaattttaatttgtggttcaggagtgggtatttcaattgctgctaataaagtaaacggaattcgcgctgttgtttgtagcgaaccatactctgcaaaactatcacgcgagcacaataatactaatattttagcttttggttcaagagttgttggtgcagaacttgcgaaaatgatagttcaaaactggttggatgcagaatttgaaggtggaagacatgcgaaacgcgtcgaaatgattgctagaattgaagatgaaaatgattaaggaggggttgttatggagcaagaagtaacacgactaattagtgcttctaaacaagattttgaaaagatgaacggcagagacttaaaacgctccatttttcaatcagaaggtagagtaattatggcgcaacatcttttatttgcaagtcagggtcttgtccgaggggttacgaatacggaattattagcagcattcggatcggatatgattatgctcaatacatttaacctagaagatgaaaaaagtaatttagggcttcaaggacttaccctcgaagatttgaaaaaacgcgtgaacatccctttaggaatttatcttggttgtccaggtgaaaataagacttcagaaaacattatttatgatgcagcaggaatgttagctaccgatgaacatttattaagagcaaaagaaattggcgcagattttattgttttaggtggaaatcctggttcaggaacttctattcaagatatcattgaaacaacaaaacgagcacggaagttgctaggtaacgatgtcttaattttcgctggaaaatgggaagatggtattgatgagaaagtgttgggcgatccacttgctaaacaagatgcaaaagaagtgattaagcaattgattgatgcaggcgcggatgtgattgatttacctgctccaggatcaagacacggtataagtgtgcgtatgattcaagagttagtgcagtttattcatttatacaaaccaggtacactcgcaatgacattcttaaatagttcagttgaaggggcggatcaagatacaattcgtttgattgcattgatgatgaaagaaaccggtgccgatattcacgcgattggtgatggtggtttttctggctgtacgacaccggaaaatgttatgcaattatctatttcacttaaaggaaaaccttatacgtactttagaatggcaagcagaaatcgttaaaactataaaaaggagtgaaaaaaatggattatcaaaaactagctaaagagattctggctaatgttggcggagaagaaaatgtgcgctcagtggttcactgtgctacacgacttcgcttcaaattagtaaacaaagaaaaagcagacaaaaaacaaatcgaaagcatatcgggagttattagtgttgtagaaaatgctggacaattacaagtaatcattggcaataccgttggagatgtatataaagcactgggttcttttactaaactaacagatgatggcgactcggagatagcaaaagggacaaaagattcagatgggaactttttgagtaaggcaattgatgttatttcaggtatattcacacctattttgggagcgcttgcaggtggtggtatgctcaaaggattgctgatgattcttactacttttggatggttgaccgaatcaagtggtacgtatcagattttatacgcggctgctgatagtgtgttctatttcttaccgcttattcttgcttatactgctgcgagaaaatttggtgctaatcctccggtcgcgattgcagcagcaggtgcactagtatatcctacaatgattaatctatttaatgagggagctcatattactttcttacaaataccagtcgtattaatgagttattctttctccgttattccaattatcttggcagtttggtttttatctattttagaaagatttcttaatagtaaaattcatgaggcagcgaagacctttttaacgccgatgatttgcctgatgcttatcgtaccgcttacattcttagcgtttggacctctgggtacgtttattagtcaaggtttagctagcgggtatacatttatttataacttgagcccaattgtagcgggtgcttttatgggtgcgttctggcaagtattagttatttttgggattcattggggctttgtgccaatcatgattaacaacttatcacgctatgggcgtgacaccatgattgcgatggttggaccatcaaactttgctcaagcaggtgcatcacttggagtatttttaaaaacaaaaaaaccggaagtcaaagctattgctggttctgccgcacttacaggcttttttggaattacagaaccgtctatttacggggttactttaaaatacaaaaaaccatttgttatcgcgagtatcgccggtgcaattggtggtgcgatagttggtgcagctgggtcttctggtgcagcgaacgctatcccgggaattttaacattaccaatttttatcggaaaaggatttgttggctttattctcggaattgctgtagcctatattttatcagcaatcggcacatacttcttcggttataaagacgagatggcagacggaattgctccaactacaaaagaagcgaaagaaactggcgtcgaagcagaagttattgtaagccctattcgcggcaatattgttccgttaaatgaggtaaaagatgaagctttttcagcagggttacttggaaaaggtgtagcaatcgttccgcaagaaggtaaattaatctcaccagtaaacggcactatcgaaacagcttttccaacaggacatgcgattggaattcgttctgataaaggggtagaaattttgcttcacgttggctttgatactgttcaattaaatgggaaatattttaaattacttgtggctcaaggtgatagagttttggtagggcaagcattacttgaatttgacctagaagcaattaaggcagatggttatgatattacgactccgatagttgtaactaatacggatgcttacttagatgtactcatctcggatcaaaaaactgttaattatgaagatacgcttttaacaccagtactttaatatcgaaggaggataaaaaatgtttaatttgcaaaaaggttttccagaaaattttaaatggggtagctccactaatgcgcaacaatttgaaggtggctataaagaaggtggaaaagggctttcgattgcggatgtgagggttattccagatatgccagacgaatctgattttgaatcgttcaaaacggcttcagaccattatcatcattataaagaggatattgcttattacggggaaatgggcttccaaatttatcgttttacaatggcttggtcgagaattttcccgaacggagacgaaacagaaccaaacgatgctggagttgagttttatagtaatatgttggcagagttagaaaaatataatatcgaaccagttgttactttatatgcttatgatatgccgttacaactgcttgaaaaatataatggttggctagatagagcaattatcaaagattacctacattatgtagaaacggtcgtgaaattatttaaaggtcgagtgaaatattgggttcctttcaacgagcaaaactttatttcgattgattctgaatacatgagtggttatcgtgctaaaaataaagcagaagttttccaaattcaacatcattttaatttgtgttatgcagaagcaacgaagcttgtacaccaaattgatccagatgcaaaagttggtggaaatattggtaacatttgcccttacccaatgacttgcaaacccgaagatgtcgaagcaagtgacaaagtagcgcaacagttaggttatgcttatggagatatttatttcagaggatactatccaaaatacttccttaaagaatatgaaggcgtagattttgagcaaatcattttagatgatgacttaactattatcaaaagttctgagccagacttcatgtcgttaacatactatatgtcgagtgcgattgaagcaaaaggtgaagaggaagttgtggtaatgaacgggatcaaagcgccaaacccatattgtgaaacaactgaatggggttggacaattgatccatatggttttaaacattatttgcaagagttctatcatcgctatcaattaccaattctaattctggagaatgggatgggtgcacgcgacgaaaaaaataccgatgatacaattgatgatacgtaccgaattgattatttggcttcacatattgcgcgtatgcaagaagctgttgaagaggggtgcgaaattattggttatcttacatggtccgcaacagatctttattcaacgcgtgaaggtttcgagaaaagatatggctttgtttatgttgataaagataatagctataaacgtttgaagaagaaaagtttctattggtataaaaaagtaattgaaactaatggaaatgatttaaattattaaattaatataaatctcatatatccaaagagtccttatcaatccggtaagggctttttttgttgatcaaaaattcttcttctacaagttcggttaataaattggatatgtttggctgcgttgtgcggcaatatctggcaaggactgactggttgataaagtttggtaatacaatttcatttctttcttcatcttcagtgcccatctctaccgcaagattttctaaagccatgtaaatccgttctttcggcgttttggcaatcattccaagaagtgcatagtggcgagcgaaaacatctgcaatactcgtcaaaagaaaatcatttacatccggtttgattgataatatgttgagtaaaaagtcagcatcgattttataaagcataagactttcactcatgactgtaatactatgcttttttttcggataagaggagaatgcatcaattcctaaaacattatatggaaggacaaagatggaaatgtagttcgtttttcttaaattatcctctaattcaactgcagcataaccttccacgataaaaaagatacttttcgctttttcatcttcaaaaataattttttcatttaatgtataggttttcttcgttacatatttatagtagtctggaaattcttttaaatatccaagtacggtatcaagtttctctggcattatagtgcccccttatatttgaataattaccactttattatacgctatttctttaaaaaaaatattatgaacagtttgtgacgttatctagattggcttattgtatacatttttaattaaaaaattttttaaaagcaataaaaaaaccattttagatatatttaatgtataaaaggggcgattttcatttgatatagtacattcatagccagtgtgacccaggtggtacggtgatacggacagacaggcgaaaggaggaaattatgaagtttgatgatagtaaacccatttataagcaaatcgttcattatattcatacagaaattgttacaggaacatacgaggctggtgacaagctactatctgttagagagctagcaacaaagttagaagtaaatccgacaaccatccagcgagcttatgcagaactggaagaaacggaaattatttacaccgttcgaggtactggtaaatatttgacagaagataagaggagaattgagcaattggaaaatgacatcgcaaaacaacttaccgaaaattttattagtgaaatgagtaaattaggaattaataaagaaaaaattatcgcttgggtgaaaaaagtagaggaggtagaagtaaatgttagtgggaaataatatcgctaaatcctatccaaataaattagtcttacaaaatgtggacttcgaagcaaaatcaggcgacatgatcgtactcactggtgaaaatggtagcgggaaaacgaccttgctagatatgttagcaagcttgaagaaaccggatagtggcacattggaattagacaatgaactatttactaccaatgatatccgccagcaaatcgcttatttaaataatgaactttacgctaaaaaaagtactactatagaagattttatgaaacaacatggtttgctttttgaaaatattgagttagataagtgggaccgattacttgctggatggcgaattaataaacgactaaaacttggcgaactatcaacaggtatgttaatgaaagtgaaaattggtagtgttttagcaagaaaagccaaattgtatctttatgatgaaccttttgcgagtatcgatattatggctcgttcagaagtaatgaaagctattattagcgaaacaaatccagatgctatcacgattatttcttcccaccatttagaaggaaccgaaaaattatatagcaaactttggttaattaaagataacacgttacaaactattgaaacagaaacttatcgcgaggaaacaggcaacgcattaatcgatttctataaggaggaaatgaacaaatgacaaaaatgattactttttatttaaaacaaatcagtcctattcttttgattggacttgcaattatcttggggctgaactttctggggttcacgatgaatctgctagagggaacggatttgctttttagagcaattcgaggaacgacggtgataagtttaattctagttcttatcactacttggaaaatcacgaaactcgatacatcgaaagaaaacgtaacacttgcttctctttctagattttcagaaacaaagaaatttttcggaaaactatttgctgcttatttatcagcaattactgtaattttacttcaaagtgcctttatttggtattacggttttgaaacaggaagaatcgaagcaggagatgcgttatcatttgtatctggaacgctgatgatgtttttatttatcgccatgtttgtttgttactttgttattccggtagggtggttaaaagatcacgtgaaggcgagttcccttcagaaagcagcagttattctacttctctttgctatcctaattgtcaatttactagctgaatactacttgcatatttataacagtgcggggatcatttccattttacctaatggacactttgatatttcccttctatctattatttggaatgtaggattatgttcagtgattgcaggcagttacatctatatgaaatctaaaaaaatggatactatttgaaagtaggagaataaatgttagaagttaaacaccttaaaaaatcttataagttaggaaagaaaaacgaaacaccagttttgaaagatattaatgtgaccattcaagacggagaatttgcagcaattataggaaaaagtggtagtgggaagtctacgttgctaaatattattagtggacttgacactgattatgaagggaaagttttatacaatggggaggatttacaggatattgatttagatgcctatcattttaatcatatcggctttatttttcaaagctttcatctagtcaatcatatgtctgtcgttgaaaatgtaaaagttcctttatatttgaatcctgaattatcagaaagcgatcgaaacgcgagagcacttgatttgctgaaacaagttggtctagaagactttgctagcaaaaaaccaacacaactatctggtggacaaaagcaaagggtagccattgcaaggtctctcgctaataatccagatatgattatagcagatgaaccaactggagcactggatagcgttacttcagatgaaattattaaactgcttaaggcgttggcagcaaaaggtacaaccgtaatagttgtaacccatgatttaaacattgcagaccaaaccgatgcggtattacgactagcagatggagaagtaatttcatttgaaagaaaaaaagaggttgtccaaaaagttacccacaaaaatgaaaaaaagttaagactaaactggtgggctactgcaaaaatttcttttaaaagttttttcaatagaaaattccggaatttacttgtagcacttggaacctcgattggcattatcgctattttattagcatttggacttggaaatggagtgaatcaaagtctttcaaagatttttggtacaactttttcacccaatcagattacgacttattataaagaagatggtggctcgaaatcacctgaacctaccactccattaacgagtagtgaaattaagaaaattaagcaactgtatgaagatgaaaatattacagaaatatatgaacgcactactgtccaaggaattaagtttgaatacgatggcgaatatttaaaaggtatttctggtgaaatgcaagaagccaactttaagccatcacgctatgaggatttaactgtcaaagatgagtatcttctaagcgggaaaatggtaacaagtgatgaaaccggagcagttatcccgtcaagtgtagcaaaagcaattcttggaaaaaaggattctgatgaattaacaaaaagtgacggtgataaactgattggtaaaaaaataaccttagtttatgccggaagaaacagtgacacaaaaaatacggttaaaacagaaacaaccatttctggtattacaaatccatctaaagaaggttttgctagaggatttgatgtttccacaaaaacaatgaacgattttattaaaacgaccggtattgaaaaaccgattttatctgtagatgcattcacaaaaacgacagcagaagcagaagaaatcgttgagaaatatgaggataacaaagattgggcgaattattcgattacaaacgcgaatgctttcgtagatacatttagccagtttaccgatattattgtgtacttgattgcctttattgcaggtctttcgcttgcagtagctggcgtgatgattgctattgtgctttatatcggtgtggtggaacgaacaagagaaatcggtgtattccgagcaattggttatcgtaaacgccatattcgcggacttttcatgatggaagcaagttatattattattttagctaatgtgctatcaagtcttgtcgctgtgacaattgcaaaaatagctagtcccattttagaaacgaaaattggctttgaagatatgattcatatttcgttctggaatttccttgttacactcgcaataacaataacaattggctttattttctcgatttatccaagtaataaagcagcaaaattagatgcagcagaagctttaagatcagaatgacccaactaacagaaaagaggaatttaacatgaaaaaaccactaaaaatcagcttaatcgtcgtaggaatcgccgtagtcatatttgcaggagtgatgctatcctaccgttttgttaaatcaatggacgttactgaaaatgctgaaataaataaatcagctacaggagatcatgtattacttgcaactcaaggtagtaaattcaaagacagtgtaatggaccaagtgaaaaaagacatggaaggcaaaaacgtgcatgtttccattatcgatacaacaaaattagacaaagtaaaagcagatgattatgacaaagtagttctattcactacagtgcagtccgatgatatcccagaaaacgtatcgacttttatgaatgataataaagataaaagtatccatattgcggtaacagcagattctggccgttgggatgataaaccgaaagatatagatgcaatttccgaagcatcgaaagcagaaaacaaacaagatttcgtggacgatttgacaaaagcaatcgtggcggaataagactaacagaaacacccatccttaggcagtggctcataaggaagtaaatgaacttattgatagtgacagctaacaaacagataatgtaaaagcgtaatatgatggaattaaaattcctcgtattgcgcttttattttttgaattatttttctaattcgcgataaaatcttccgttatccgttgtcttttctttgctaagtaagtaattgctatcagtaaaataactattatcaggaatatgctggaaacgagcaatctgaaatttctaagggtagtaattccttttaattctttttctgccaatttatttagtaatgttgaatagtcttcgcgattttttttaacctcttcaacaattgtagtggtactaattccaaaatctagtttcgttttttcattggtgaaataatagcaaatgatgattatgatggaaatacaacagtatttcatattattaacattgagaccttagtaacaagtaacttcctctttgaaaataaagatggtaaaaatatgtatcaatcattaagtaacataataataaacttgcaagcaaataaggatttattgttacagcaagataatgaagttgatagaattaaatctattttaccgcttgtggttgctaggaacagtattattgaaacattaggtagaaatccagtttggggtatttcattaactgatgatgtgaacaacttaaagattgataatcaactagttactgaagttattccgtttgattggaacaacgaaacattgtacctatgctactttagtgacctggaaagtagtaatagtcctagtgagatgggaataagttttcagttagtaaatattttttctttgtcataaaacctattatatgtaaaataaaacattttttatgtcaaatatatttgacataatgtaaagtgggtgctatgataaatttacaaacaaaagaaaaggagcatgttttatggaaatgaacgctagttttattgggttatatgcaattacagtctattatctgtatgggtatttggaaaaacgtgaacggttagagtggttgttactattacctgttttgatggcacttactataacaattacaaatacaaacgcttattatgagaacatagtgacgaatcccttagaacaaaatattgtaagctttatcgcaagttttataattttggcagtatgtctcactattccagttagtattgtactatttttcagaaaaagaaaaggtgaggtacaatgaaaaatattaatatgaaagttgctcgagtggaaaaggatatttcacaggaagagctcgcaaaacttattcatgtgtctaggcaaacgattagttcagtggaagcgggaaattataatcccacgctgaatttatgtattgctatttgcaaggcgttaggaaaaacgcttgatgatttattttgggaggaagatgacaatgtttaagaatttatttaaaaagccgaaaatgaaggatgaaatgcttgaaatgaagcaaaatcaatacggcgcacgagcttttaatatgatgattataatagtagcaatcgttatacttatcaaagcagtggtattagaagcgagcatcagtgagctttgggttgaattattattgctcatcgttggtggtggctattatttttactcagtgctgaaaaacaatgttccatttatgccaacaatttcgctgaaacaaacaatcagattggttttcttgatatcagcgattttcggtataagcgttggtatccgcaatgtctttttcctttacgcagataatatgtcgggaaccgaattgagttatcaaatgatgatgtttttctttattagcttgtttactgcaattgggagtggtgttatatttggtgccttagcttattgcttataccaattatcgaaatggcaagaaaaaaatattatgaaaaaaattgaagtagaaaatgctgaagattaaaaataatagaagtcctgaataagatggaattattttactgcaactggaaattgtttggatattgccaagtggtttgacaatgccgaactttattcaatttcacaagttttaaaagaaaatgcggctcgctttgaagacgattgtattggaattatttttccttgttataattttgccgcatctcgcatggtttgcgagtttattgagagaatacaattagttagtcaatacatttttgttattgtcacttatagtaatacggcgccaatgtgcgcctctaccgaactatatgaacacttccttatgagcacctaccatttggtgggtgttttttggaaaataaatccataacagctttctcctttcgtaaccacggttacagacgaaatcacaaaagctatctatactaaagttagattttagataaattagaggagatggtcataatgagcgttttaaacattgaaggagcaaaattatcgtatcagaaagtcggacaaggtcctattcttatttttataccgggagcaaatggaactggagatatctttttaccactggcagagcaattgaaaacatctttttctgttgtaatggtagatcgtcgtgggtatggggacagtgagttaacagcagctataccggagcgcgctagtcatgcatatgatgattaccgagtgactagagatgctgctgatattgctgcactcgcaaaagcgttaagcgacgtgcctgtttatattttagggtcaagctcgggttcgattgttgctatgcatgtcttgaaaaatcacccagaagttgttaaaaaaatagcctttcatgagccaccaatcaatacattcttaccagattcggagatgtggcaagaagcgaatgaaaagattgtacaaactgccctaactaaaaatatggcagaagcaatgcaactttttggcgaaacacttcatattgcccccattgacgcagaaagcatgtcgaaaccagccgtaacaatagacgaagtgacaaaagattcaaccacgcaacaaatgaaatactggttcacttatgaaatccgccaatatactagctctaatatatctttagacgatttcaaaccatatgttcatcagattacgttacttaatggtaccgattcaaaaggctcattcccacaagatgttaatgcctttatagccaaacaactcggattaactatcgtggatattccaggcggtcatttaggttatattcaaaaaccagccggatttgctaaagtacttttatcaatctggggataaaaataaaaaattctgctaaaggttaaatttagcagaatttttttgatgtagtcgtaattgctatttggaagaaagtggtctatgcttatcgtgaaaagtaactttcatttaagaggagaagcaaaatgaacattcgaactgaactgcaaaatagccaattatgcgaaggtataacagaagctcaattaaccgaactgatgaacaaaattacggttaaagagaagcactataaaaataatgaaattttattttatacagatgaagtaacgaaagtatatattttagttaaaggaaatgcggctattgctaaaaatacaagtagcggtaagcgaattctaggtaaaaatgtcacagaacctggggaactggctggggagatttattatttctcgcatcgtaatccattttgggactacgcgatcgtgcttgaaccgacaacagtactagaaattagcggaattgaccaaggaactcttcaaaccttagatttagctttacaaaaccaactattagtcaatttattaaaaagtgttactagaaaatttgaatatataggtgaaaaggtacgaatggtttcagaagactctgttcgtgcaaaaataagcaattatttatttggcatccaagacgatgatggcagtatcgaattaacagaaacaagagaagaaattgccgactatcttgatattacaagaccttcactttcgagagaacttggcagaatgcaaaaagaaaatattattcgtatcgaaggaagtagcgttattattttagatgcgattatatttgatacttttattgagtaactagtaaccagcgttacatcttttcgtatgcggtaatggtaagctattcgtattaaaagaatgaatacggaggagattacatgttattaactagaaacgaaccttttaccgcagaaaaaatacaagcaaaggcagacatccttgagctagttcaatttgaacgattttgccgcgataatgcactttgggacgcaatggaaacctgctttacaaaagattcaaacgtaaaaatttcctggtttcaaggaactgggcatggctttattgaggcatcaaagaaaatgaccaaccctgcgccacataaaatatacaatacccaagtttggattaagaacgaccgagctgtggcgataatgcaagccactatccaaacacgcaccatcataaatggagtagaaatggaacttaattctgacgccaaattagtgacacgagtagaacgaatcgatggcaaatggtacattaatgcatttgaaggagtttatgagaaagactcattgatgccagtggttccaagtaaaaatgctgatgttcctgctgagttgttagctaattttagaaaaagctatgcttgcctagcactttcattaacattaaacggctatgagattgataataatcttcccggcattgatcgcccggagcaagtgactcaatttttcaaagaagctgatgagtggttgctccaataatttaaaaaggatagctagtttttactagctatcctttttaaatgaaggagtctcattttaaagtatgctatacttagtgaaatataaacctcatgaaacggtaggtggttgtcagtgaaaaagagtaagacggttcaaattctattagttttttccgttgttgcgttaattttgagcatggttggggtggtatcaatttggtatgggcagaaaaatcatcaaacgaataatgcgaaaaccaccgccaaaaaagagactacagtaacgaaaaaacaagatacgtttaaaataacggcgctcggtgattcgcttacatatggcgttggcgatacagaaggcggcgggtatgtccgagtggtggagaatttctacaaacaaaaagagaaaaatgtcgagaatgtcaatcttgctattagcggggcgaaatcagaccagcttctcaaacaattagatcaaaaagaagtgcaaaaccaaataaaatcagccgatgttattttaatgacgattggcggaaatgatttgtttcgcggcggggaagcgctggatgattttaaaagcgatgcgattaaacaagccgaagcaagttatacgagcaatctaaaacaaatttaccaaacgatacggaatttaaatccatccgcgccagtttttcatattgggctgtataatccgtttatgtcgttagaaaatgcgagcgaaatgtcggcagttgcgaatgagtggaacatgcaaagtcaaaatctatctcaaaacgagaaaaatatcatttatgttccgacttttgatttgtttcagcaaaatggggatgcatatttagcgactgataaattccatccaaatcatgccggatatcagtttatcggtaatcgggtggcggaggttatagagacgggagggggagaaggcgatgacggagcgagcacttcaagtaactaatctgcataaaaaaattcgtaaacgagaaattattaaagggatatcatttgaagtaatgcccggagaagtttttggctttcttggaccgaatggcgctgggaaaacgacgacgattcgaatgattgtcggcttaatcaaaccaacgtctggaacgattttaattggaggcaaagatattcgcaaaaatttcaccgaagcgatgcgcggtcttggttctatcgtggagaatccggaattttatacatttttaacaggacaagaaaatttggcgtattttgcccgaatggattcttcgattaaaaaagaacgtattcaagaagtaaccgaactagttgggctagaaaagcggataaatgaccgagtttctacttattcacttggtatgcggcaacgtttagggattgctcaagcattactttcgaatccgaaattattaattcttgatgaaccaacaaacggtcttgatccatctggaattcacgaaatgcgcgactttatccgtgctctggctagaaatgaaggtattagcgtgctcgtgtcttctcatttattaagtgaaattgaacttttatgtgatcgggtggcgattatgacagacgggacgattattaaaaccgaccaagttgcgcacctgctcagttctcgtgcgcaattacgctggcgggtgactccaatagaacaagccaaagcctttttggaaagtgtgaccgaagtggaagtggacggggagtacctagtgacagctatgaatgaggaaagtgcagagtggaacgaacaactcgttgcaaaaggcatcaaagtccatgaaatcgacaagcgaaaaccatcccttgaagatctattccttgagttaacgggaggtcagtctattgattaatttagtgtataatgagcaattaaaactttggcgcaaaaagcgactcatcgttattttagcgttggtggcaattatcgtagcgattttcacgtatgcgcaattcagacagcatcaagaagatgaaaagcaagctgggacaagcgattggcatgtacagactcagcaacaaatcgtcgaccttgaaaatcgacttggcacagggcggcttcccgaagaatatcaaaaatattttaaagtgcttgtcgggcaactacaatattatttagatcatgacatcaacccaaatgcacccggagcaccaactttcctaaaaacgtttgttgaaaatggtattagtttattgtttccactttttatcatggttatagcagccgatttaatcagtgctgaaacaagtgcgggaacgatgaagttcttgctgacaagacctgtgaagcgatggcggattttgacgagtaaatatgtttcaatgttgctttcgatttccgcgattatggtgttgtctgccgttattgcctatctgatttctgggattgtctttggctacggtggctgggacgcgccagttctcaccgggtttggcatgaaagatggcgctgtaacaacaacagacgtttaccaactgccggtttggcaattactgctcatggaatttggcctcgcgtggtttgtcagtgtcgtggtcggcgtgttaacgatgtttgtatccgtacttgtccgctccacagccgccgtaatgggaattatgctcgcctcacttattaccggaacaattttaaccaacctcgtcagctcctggccaagcgcgaaatatttatttatggtcaatttgcaactaacgaattatttaaacggctccagcccaccagttgaaggaatgacattaagtttctcaatgctcgtcttaaccgcgtggatgctagtagcgtttatcttatcctattttattttcacgaaacgagatgtgtattaaagagcgctgattggcgctcttttttgcgtccattaaaagttacttactttttgtgagcataaaacttttcttttgaatagtttagttataaactatagttagtaatcaaaaaggaggtacaaacaaatgattaaaggaattcatcacgtatccgcgctaacaaaatctttcagcgaaaatcatcatttttattcagaaatattagggctacggctcgtgaaaaatacagtcaaccaagacaatatccatatgcgccacttattttatggtgattacatcggttcccctgggactttactgacatttttcgaagtgccgcgcatcggctcaagctacgacgaacgcgcctttttcggcaaaatgaccctaggcataccaacagacacaagttcttactgggaaaaaaggctaaacgattttgcaatttcttttcaaaaagacggacagactttaaccttacaagatcccgatacaatgggcatcatcctaacggaaataccagctactaattctaacccaaccatccacaccaatattccggccgaaaaacaacttgttcggattatcggcgctgattatcacgtgccagatccggccgcgaccagccggtttttcacgaatctttttgagttagaaagtcaggatggggtattagtagataagagtgagatgagttttgcgaaactgcatgcgaccacatcagacaaaaaatcccgcacaggccgcggaaccattgatcatattgcttatactttagaaacgaaagaagccgtcgatgaactgcacgatttagccgttcgaaacgatttaaaaatagaagaatttgttgaccgtgagtattttaaaagtttatatattcgtgagccaggtggcctgagaattgaattcgcaagtgctggccccggttttactatcgacgaaccgctcgaaacaatgggcgaaagactagccttaccaagctttttagaagaaaaaagaacagaaattgaaacttattttggaggagatttatgatgattaaagatttaaaaggaattcaccacgtaactgcaatgacaagtagcgccgagaaaaattacgcgtttttcacagaagttttaggaatgcgtttagtgaaaaaaaccgtcaaccaagacgatattcatacgtatcatttatttttcgccgatgacaagggttcagcgggaacggatatgacattttttgactttccaaatttaccaaaaggtcgtcacggcacagatagtatttctcgcgtagctttccgagtacctagtgatgcggcgcttgaatactggcttgaccgctttgaacaattagaagttccgcatagtgatatcaaaactctatttggcaaaaaatatctcacattccaagattttgatgaccaacaattacaactgatttctgatgaaaataacgaaggagttgcaccgggaactccttggaaaaacggaccagttccagaaaaatatgcgatttatggtttagggccagtctttttaaccgttgtttctttgaaaaatatggatgcgatcttgcaaacaatttttgggtttagaaaagtcacagaagaagacggacttcatttatatgaagtaggcgaaggtggtaatggggcgcaagtgattgtcgaagaacgtaccgatatcccagctgcaatgcaaggctacggcggtgttcaccatgtagctttccgagtagaagaccacgaagaattgcaaaaatggattgatcgcatgaatacaatcgaagcgcccaactctggttacgtaaatcgtttctattttgaatcgttatatgtaccggtttcagaacgaatcttgtttgaatttgcaacagatggtccgggcttcgcaagtgatgaaccatacgaaacacttggtgaaaaattagccctgccaccatttttagaaccaaaacgtgcagaaatcgaaaaaatggtacgtccgattaatacgaaacggagctgataaacgatggaacacatttatattcccggaaaaaataaggatttagctccattattactacttcacgggacaggcggcgatgaaaagtcgcttgtcgaagtagcagaatttatcgcgggtgatgcggctgttttatcgttacgcggtgatattaaagaaggcggagcaaatcggtttttcaaaagatttcatgatggcagtttagatttagaagacttggaaagtaaaacctcggaattaatcactacaacgcgcgaacttgctaaaaaatatcaactagattttgagcgaatcattgcagtagggtattcaaatggtgccaatattgcggccaatgcacttcttcaagcggagaatagctttcataaagcgattttatttcatgcaatgccagctggaaacaaacaacccgaattttcgattagccatcgtagtgtatttctgtccgctggtttaaatgacccgcttattacagcgaaagcttccgaagaattagttgaaatcctcaaacaacgtggagcgaacgtggaaacggtttggacagcagctgggcattcactgactatggaagaattagaagaagcgaaaaaatggtatcaaaacaaccagaaatgagggaagtagatgactatttttaaaagtgctgatttatcccaaaaagaaaactacaaatttttaactggaagcattattccgcgaccaattgcttttgtaacgacgcttgctgaagacggggtgacggttaacgccgccccgttcagtttttttaatgttgtttcaagcgatccagcgatagtttcgatagctgttcaacgtgcggatggcgagcaaaaagatacagctagaaatgcggcttttacgaaagaattaaatattcatattgttagcgagtcttttgtggaagaaatgaataaaaccgctgctcgacttgcacctgatgtgagtgaaatcgaaaaaacaagcttgcatttagagcaagttcctggaatgaaaactccaaaaatttccgaagcaaacatcgtgcttacgtccaaactagagcaaatcattcccattaagaatgacgctggtgaggttgtttctgatttaattcttgcacgtattttgacatatgattttgcagatgaggtgtttgattctgagcatcattatattttgccagaaaaacttgcaccagttgccagactcgctggaaatgactatacaaaacttggcgatattttccggattgaaaggccgaattaacgagaaatagttgcgaaacaaaaacgaccatgttaaactaggagcaacttaaatgaacggagggttgcccatcatgcgttatattagactacgtttccccaaaaatctatgcaactaatttaatagtgcgggaatatccatgcttatttagtgtgggtaacgggattggtcttgcgtgcatgtttggcacccaaaataaatatgggtagaatgaagaagaaatactcttcatttgaaagcaagctagtatctttggatgctatttttgtgttttcatctactcaaaaaccctgaccgcgctgaatctatttcaggaggtccttttttatggagaaaaaagtattaatcgttggtataagccaaaaacaaaaagattttgattattcaatggaagaattagccaatttagcggctgcaaataatatggaagtggtgggcgaaatacggcaaaatatcgaccgtgaaaatcgcgccacgtatgttggaaaaggaaaagtggatgagatcaaagggctggcagaaatgcaggacgctcgcttgattatttttaacgatgagctttcgccgtcgcaaattagaaacctagaagaagcattggaactagacgtaatggatagaacaggattgattttggctatttttgcgaacagagcaaaaacaaaagaagctcaacttcaagtccaaattgccaaattacaatatgaacttccgcgtatttttggacaaggcgaggatatggaccaacaaagtggaaaaggcggccttagcaaccgtggttcaggtgaaaagaaaatcgaaaccgaccgtcgtaccatcaaacatcaaatccgccatttacaaaaagagttagacatgctcgttgatgaccgcgaagtacgtcgtcgcaaacgaaagaaaaatgaaattcctgtggtatcgctcgtgggttatacgaacgctggaaaatcaacaacgatgaatggtttagtacgggcatatagcgaaacggcagacaaacaagtttttgagaaagacatgctctttgctacgcttgaaacgagtgtgcgcgaaattgttttgccagataacaagcaatttttactcacagatacggttggttttgttagtaaacttccgcatcaattagtgaaagccttccgttccacgctagaagaagcgcgtgatgcagatttactcattcacgtggtagattattctgatccgcattataaaacaatgatgaaaaccacggaagaaacattgaaagtagttggggtggaagatgttccagtcatttatgcgtacaataaagcagatcttttagaagacgaaatgtatcctaaacaaacgggaaatacgattatcttttcagcgcgagaagaagaaagcttagaatttctaacagaagtgattcgtaaagaattatttgccagttatgaaaaagcaaccttcttaattccgtttgaagcggggcaagttgtcgcttatttaaatgagcatgccgatattttagagaccgaatacttggaaaatggcacgcagattgtggcggaagtgagtccggctgacttacaaaaactagcagaatatcaagtagctgagtaaagcgagttccttcttaatttgctataatgaaacatacagcaaatttagtgaggagatttctatctatgaaaaaaactggatggggtatacttggtgcggttgctgcttttacaggctatgcttactggtcaacaaaacatttaaccgtaacaaattatgaaatagtatcagataaaattccagcagaatgggacggcgcaacttttatacagctgtccgatctgcatagtgcaagttttggtttatataataatcctttgctcagtatcgtgaatgagctggctccggatgccgtttttctaacaggagatatgattgatggagatgagtcgccatatgtagcgatggcagttgtgcgcaaattggctaaagaattcccggttttttatgtgagcggaaatcatgagggtcgaagtgcattttatgaagattttaaagcagacatggaaaagcatcatgtcgctgtccttgaaaatgaacgctattttctaaaaaaagatggtgcagcgattatggtagccggcgtccaggatcctcgtttcgtaaaagaaaattgggctgaaaaagaactaccaaaagaagaatgggaagaagcagcattaaaagaagctttagacgatgcgacagctaatttatcctcggattactttacgatattactggcgcatcgtccggagttttggccactttaccaagcgtacccaattgacttagtattatctggacatgcgcacggcggccaatttaggcttccgctaacagaaggccttttcgcaccgggacaaggtttcatgccaaaatggacagctggcattcaccgggctggagggaaagcacttgttgttagccgcggtttaggaaatgtaacgaaacttccgcgcttatttaatgatccggaagtcattcgaattacgcttaaagcaaaaggggatgcttaaaaaaagtgatttatttagataacgaagatgtacttgatcaagcgtacaactttgcaatggaagaatatgcgctgcgttctttagatgaaaatgaaacgtattttatgttttaccgtatgaagccaacgattattgtcggtaaaaatcaaaacacgctggaagaaattaaccatccttttgtaaaagaccatcatatcgacgttctccgccgtttatctggtgggggagctgtctataacgacgaaggcaatattagctttagcatgatcacaaaagatgatggaaatagttttcaaaatttcgcgaagttcacagaaccagttattcgagcgctccgcaagcttggtgtaaatgctgaactgagtggtcgaaatgatattgaagtgaatggcaaaaaaataagtggaaatgcacaatttgcaacaaaaggtcgactttatagccatggaactttacttttcgatgtcgatttatccatgctcgaaaaagccttacaagtggatccagagaaatacttgtccaaaggtgttaaatctgtacgtagtcgtgtaactacaattcgcgagcatttagcagaagatatcgatattctgacctttaaacaaattctactggaatccatttttgaaacgaaagatatcccacgttatacttttacggaagcagataaacaaggaattgaaaaattacgcacggagcgttatcggaattgggactggacatacggtaaatcaccaaaagctaccataaaacgcaaaaaaagatttccagccggaaccattgaattccaagtttcactagaaaaaggtcaagtaaaagaagcgaccatttatggagatttttttggtacagaggatgttgctgaattagctgagaaaataatcggatgccgttttgaacgtaaatctattcaaaatgcttggcaagaaataaatgcgaaagactattttggtggaattgaaaaagaagcaattttagatatgttatttgaataaagtttaaaactctgagatatagattctcagagtttttttaatgcctaaagaaagcgatttcaattttatgttgacagagattaaatatatatagtattatttaaatatgataaatgataattaaatataattaattaaaaggagtgaaacatttggttattgaaaatcgagattttatacaaataagtacggaaaaaataaaaaaagaaataaataatcaaaaattagttgaaatgtataaaaggtgtatggaaaacacattagacaccaccataaaaattcgagacagtggactcacatttattttaacaggtgatattccagcaatgtggctacgtgattcagtatgccaagtacgaccttttctaatttttgctaaagaaaatgaagaaattgagtcgatgttgattggccttagcaaagaacaagtgagtttagttgaaattgatccttatgctaacgcttttaatgaaacaccaaatggagctggacatcaagctgataaaacagaaatgcatccacaagtatgggaacgaaaatatgaaattgattcattatgttatccgatccaattagcttatcttatttggaaaattactggaagaacagaacaatttgatgcagcatttttcaagatgttacaaacgatttttgctttatgggaagtagaacaacatcatgaaacaaaatcgccgtatcgttttgaacggctggactgtgttccttctgatactctaaaaagaaacggattaggaacggaaacagcttacaccggtatgctttggtcaggatttagaccaagtgacgatgcttgcgaatacgggtatcttatcccttcaaatatgtttgcagtagtcgttttaggttacgcaaaagaaattatagaagctttttacccaagtgagatagaaacgatcaaacaagctgctaccttacaaaatgatatccaattaggaattgaaaaatttggtacatataatcatcctacatttggtgaaatatttgcatttgaagtagatggtcttggaaatcaattattgatggatgatgcaaatgttccaagtctactctctatgccaatcatcgaatatcttgaaaaggaatctcccatttatcagaatacgcggaagtttattttaagtaagtcaaatccgtattattttgaaggtaaactggcaaaaggaattggtagtccgcatacaccagcaggatatatttggccaattggactggcaattcaaggattgactgcaagtgataaatcagaaaaactggagattttgcaaatgttgttaagaacggatgctggaactggattaatgcatgaatcgtttcatccagattacccggaagactttacgcgcgaatggttttcttgggctaatatgatgttttgtgaattagtacttgatgtagctgggtttcgaatggcaaatgttttgaagaactaacgaaggaggcttattgatggcaacaattagaaataaatctgcccaaatacaccaacaacgaatggcttacctttttattgcacttccagttttattactagcgatttttatgattttaccaattggaatggcactatttgtcagttttacagattatgatattgttaattctcccaattggattggctttgacaattacataaaaatgtttagagatccttattttctcatttcattaaagaatactattatatacaccgctctgtttgtaccacttggtcttgtagcatcacttggggctgctatcttgattaatatgaataaaaaaggagcaggtttatttaggacatttttttatgtgccggtattatgctctacggtagcaactgcgacaatatggtattggttgcttaatcctcagtatggtttgattaatcgtgttttaggatggtttggaattaatggcccagcatggctctatgattcgaactgggcaatgtttgcgattgtgatgatgagtgtttggatgacatttggaacaaatatgatgatttttcttgccggtcttcagggtatcccggctaacttatatgaagcttctaaaatagaaggagcttcaagatggaagacatttcgttatgtcacttggccatccctttcacggaccactttcctcgtaacaacaatgctaattatcaatgcttttcaggtatttgatcaagcatatgttttaacaaaaggcggtcccggaaactcaactattacgcttgtctactacatttacaatgaaggattcggaggattaaaaatgggctatgcttccgcaatttcttttgtgttatttttaatcatactagtattttcgattatcaatatgcgtgtaaataaagaagataggacagcttaaggagggttgatatgaataccataaaattaaaaaaagggagcaagtcgttcatttggtatattgctgtacttctaattagtttagtgactgtttttccacttatttggacagtgtctacttcctttaaaccaacaagtgaaattttaagtaatagtatgaatttaattcctaaaatgtttacttgggataattacaaagatgtttttagtacaaccccatttgcccgctacctagtcaactctttaatacttgcagttggtggtgtgctcactaatttattcttcgggtcattagcaggttatgcttttgctaagctaccttttaaagggaaaaaaggtctttttatgacatttttaggaagcatgatgattccagcagtagtaacaatgattccatctttcttagtattaaagaattttccattgatgggtggaaatgatattactggtcatggtggtatgggttttattaatacttactgggcaattttgattccaggagccgctggggcattttcgatctttttcatgaaacagttttttgaaacgttaccagatgaactttctgaagctgcaagaatagatggttgttcggagtttaaaatcttttggaaaatctatatgccgcttgctaaaactgcattagctactcttggaataatgacattccaggctggctggaaccagttcatgtggccattaattgttcttaattcacaaaaaatgatgacagttcaagtaggacttgcttcttttcaatataatgagagcgccaattatggggctttaatggctgggacaattgtttctaccattccagtattatttgtatttatttttgcacaaaaatattttgtagaaggtatcgcgcatagtggcggtaaataaaccaaaaaaaggagtgtataggatgaaaaaagtattgttagcaattcttagtatggtgttgttgctcagtttagcggcttgtggtggaagttcagacagtagtaaggataagaacggaaaagaagaaattgttatgtggggctcttggtcaggagatcaaattaaacagttagaaaaacaaatcgatagctataataagtcacaagataaatataaagtaaaatatgtaatgcaagaaaatgtagaagaaaaattattaacaggaattgcaggtggcgaactccctgatattattatgtgggatcgctatcaaacagctctttatgcaccaaaaggagtgcttgaaccgctagataaacttgtcaaagaagacaacttgaagatggatgatttttatgaagaatcagtgaaagaaatgacctatagtgataaattatatggtttaccactattaaatgataatcgaattctattttataataaaaaattattacaagaagctggcgtaaaaccaccaactacgtgggatgaattagcaactgctgcgcaaaaaacaacgaagtgggatgggaataaaatgacgcaagcaggaatgtcgctccaagatgttgggttgtttaacttatatttaatgcaggcgggtggcgaactagtaacttctgacaataaagaaacggcattcaattcagaacaaggcttagaagtactaaattactgggataaaatgcaaaatgatttaaaagtgtaccaacgtggttttgatgatggctccgatgcttttgcagctggaaaagaagccatgacatacaacggtccgtgggctttagcagattataataaagtagaagaccttgattatggtgtagtagaaccacctaaaggaccaaatggcgataaaggcgctatcatgggcggatttggattagtaatgcctaaacaagccgaacataaagatggcgcatgggactttatgaagtggtggacaacgaaaccagaaaatggcgtagaatttgccaaaattagtggttggttaccagcaaacaaaattgctgctgaagatgaatattttacgaaagacccaaattattctgtttttgtaaatacaatgaaatatgctaaaattcgtccaactgtggcaggctatgcagacgtagaaggtttagcaatgaaacctcaatttgagaaattcatgaatggtaatatttcagctgaaaaagctttatcacaagctgaaaaagaaggaaaccaaattttaaaagaagagagagataaataaacgatgaaatggtccgaatatgcaaatttagctcaactaagtttagaaaaattttatcttgccgatacaaaagaacaatttttaaataacttttatccgacagaaaatcctgaggaagataataaagtttttaattattggtggctagctcacttggtggaagtacgattagatgcatacttacgcacaaaaaaacaagcggatttggagatagcagaaaacacatatatgcataataaaaatagaaatggtgaaacgcttattcatgatttttatgatgatatgctttggaatgcacttgcggcttatcgtctatataaagagactggaaaaccaatttatctagaagatgcacagttggtttggcaggatttagtggatactggttggaataacataatgggaggtggctttgcttggcgtcgaccacaaatgtattataaaaacacgcccgtgaatgcaccgtttattattctttcttgttggctatataatgaacttaatgaaacgaaatatttagagtgggcaatgaagacttacgaatggcaaactaaagtccttgtacgtgaagatggttttgtagaagatggcattaaccgtttagaagacggggccattgattacgaatggaaatttacttataaccaaggtgtttatatcggcgccaatttagaattatatcgtattactaaagaagccaaatatttagacactgcgaataaaactgcggatacatcattaaaagaattaacggaagatggtatatttaaggatgaaggcagcggcggagatgaaggactattcaaagggattttttacagatattttactgatttaatagaagaaacggcggataaaacttaccgggattttgtgctaaatagttgtcaaatactcgttgaaagcgcaaaagtagatggatatttgttaatgggaatgaattggaaagaaaaaccctctggaaaaattccttattcagcagaattaagtggaatgatcgcacttgaaatggcggcaaaactagaacgataaaaaaagcacctcctacttggaggtgctttttagcattttgaccgaatctccttctataagcattggaggtagagtttctttgtttatagtatctggttttagcacttgatttaaaagcatatcaactgctttcacgcctatttcgtattgggcttgtttaatatgtgtaaactggaaggcagaggtatcaaaaaaattatctggatgatcaaaacaaacaacggataaatcagcaggaatggattttcctaacttgttgcatgcttgttttatcaaaagagcaatattgtattcagttgctacaagtgccgtgatttcagaatgtgtattcaaaaaatgtgcaattttatcaatatctgtttggatggaaacggttgaatttggcattactgattcaatttcacgaaaaacataatcagagtgaaaagctgtgtgaaaagatgcatgccctcgaataaatccgtttactcgactatcaagcgtagagactggactagtagatgttatcattccaatgtgcttatgcccaagttcaaataatttttctgtaataattcgaccagcttctgtattatctgaactaatagaagatattggtaagccttctaatgtacgatctatgacaactaaaggaaatttttgagaagcaagttctagtaaggtcggtgaaacaaacttcgaactagcaggtaaaattagtatcccagcaacattcatttcaataaactcttgcaaaatttcttcttctcgctctgtatcgccaagtgatttttttacaataatatgagctttagagtcactgtgctctaacatcccagataataaagtagtaccaaaagtatcgtcaaaatttgtcataatacaaccaaaaaggggtttatcaaacattctagtttctatttgttcgctaactggcgaagcattaattacaaaagtaccaacccgagggcgtcttgaaatataaccatctttctttaataattctagcgccttttttaacgtaatactgctcacatcaaattgagccatcaattcattttctgcaggcattttgctgccaacaggaatcttaccttcttgaatcgacagtttaagctgatcatagactttttgatatagtagttttttcattcactcacccattaaatatattttataatattaattatatttaattttgaccttattgtaaactaattacgataaaaaagtgaaaatctccttacaaactttaataaataggtgactcatggtaaacttgaatttaggaaaaaaggaaaaggtgtagaaatggccatcaaaaaattaaatgatttttattttaaaaaattagggaactggaatttaatacatagctttttgaaaggattttggcgagcattttttttcttgctactattgttactaattgctgatttgattgttatgaaattcgtgaatgatcgttattttattccagttattttattaagtttattatgtattcctctcttatactacatcttgatttacagtcgagctaagaaattcatcagaacacggtatcaattgcggagttttgctgaactaacaaccatgcgccgctatttattatatgcttatttagaaaaaagtggttttagtacacgagctgatttggaaaaattaattcgttttattcattctgaaatggcagaagaaaagaaaaattatcaaccactcagtactgttgtgggcgtttttatagcggcatttttagcaattttaggcggtacatttctattcttgatggatgatgtggtggagcggcttatcgcagcggttctaatcatggtaatggcaattttactttttattgtaggcacttttattatgtcgataattcgctctaagtcagaaaataatacgaaaaaagaacgggtattaacaaaagaaattattgcaattcaaacggcaatacttgttagtgagaatactagttaccacccatttttagcgatggagagaaaaatagctgaaaacgattttttgaaagagattattacatcacgatcctttttataaacacaaggttatagacatatttaggaggcagaataatgacaaccaaacgcaaagagactagagaaagtgtttgttatcgggaaatcaaaaagaagattagaaacggggaactaaagccaggagatcgtttaattgaaaatacattatcacaacaattagaaattagccgtacacctattcgaaaagcaattgggatgcttgctgcagatggatatgtggaatacaatgattttcgcggcgcttttgttcgggacagcattattaataaagaacgttactttgaaatgacagaaattattggtttgtttctaaaacaagctattcaaaaaatccgtacaaaaaaaataaccttcaataaaatgcgagttgttgcaaaattagtcgaaattgaacgtgaagaaccaacagacccaggtatttactttgaatacgaaaaatggtttgtgagtgatttattaacctatatgaaaaataattactatttgaaaattagcgatgatttttttaataatattcaagaatttggtgacgaagaagtcattaagattgctcaaaatgcttgtgttaaaacagttgctaatattcaacgttttattgatgcattagatgaacaagattatgataagtgcatggcgattattgatcaagtcattgatgcccatgtcttagtcgcttatcgttgaaaaagcagtgtccttatttttaaggacactgctttttatttattttactttcactaaatatctaccagtaacgccgccattcattacttggtgaagtgattcaggtaactcagaaaatgctatttctgttgctaaactttctaaattagttaatttataatctgtcgcaagtctattccaaattcgttctcgttttgacatcgggcataacactgaatcaataccaaacaattgaataccacgcaaaataaacggaaagacagttgtatctaattttccaccagcagacataccacatgtagtaactgccccgccatattgaacagctgttaggaggtatgaaagaggttttccaccaacacaatcaatggcaccagcgtatagttgtttgtctaatgcgcgcactttttcaggttgaaaagcttctcttgaaactatttcagatacaccgaatttttctaagaattcctttgcatcgctttttccagaagaagctacaacagagaagccgcgtttggaaagtatggctgaactcagactccctacgccgcctgttgccccacttacagcgatttttcctgcatttggtgttacgccactaaattcaagcgcatccactgatagtgctgctgtaaagcccgctgtgccaagtatcattgcttcttttaatgataggccatctggcaaaggaacaacccattcagccggaactcgaataaactcactatatccgccaaaataactcactccaaaatcataactagtgacaataacctcatcgcctacttgaaactggtcagatttagagttgacgaccacaccacttgcatcaataccgggaataaaaggatattcgctcacaattttcccgtcaggaagtacagccagtccatctttgtagttaataccggaatagtgtacctcaatcgttacttcattttctggcaagttatctatagtagtttctctaaaatgaagggaagtattatctgcttctttttcaatgaaaagtgcttgaaatgatttcattttttaaattcctccacaactcaattttgtgttccccttcactttacgacttttttcgccattttacaaggctgtgactggtacaaatccccatttcaaggtaaactagaatagagaagatgccgatattatgtgtgaatttataaatagaattttttggcaagaaagggtgagtgcgatggggaaggcactattgattgtgaatccatcatcaggtaaagaaaaaggaaaaacctatcaagggaagacagaagaagtattaaaaaaacgttatgatgaggtggaagttcgcctgactgaaaaagcaggggatgcaacagaatttgcttcttgggctgctgaacaaggctttgaagcagtcatcgcgatgggcggagacgggactttaaatgaaacaataaacggtcttgcaatccatgaaaaacgacctgactttggcttcattccgcttggaacagtcaatgatttggctcgttcggtaggcatacctctaaaaccagaaaaagcaattcaagcactagaaaaagctattgcagtaccgatggatgttggccggattggcgaccaatactttatgaacgttctagctatcggtatgattgcgcaagctgtcgaccaagttagtgtcgaacaaaaaaccaaatttggttccgtggcttactttttagaaggtttaaaagcattcaaccgcaatgaactacttcattttaaaatcgaatatgacgaggaagtttgggaaggtgaagctgcgctcgttgtggcaggcttaactaaatccgttggcggaatggagtcatgggcgccagacgcaaaaattgacgatggctatcttcacattattattctaacgaaactcggcttactcgatgcagccaacatgatcccgcaattaattcgcggtaatttaaaaaacagtgatggtgtagtgtatattaaaaccaagaaactgacaattgatgcaagtggagatgatttaagcatcaacgttgatggcgatccaggtccaggcgtaccagcagaaatcgaagtccttggcagtcatttgaatatccttgcacccaaaaaaagcagcaagaagcgcttcggcccattcatacttaaaaagtaacctacaataattgtagaagaataaggagatgaaagctttatggaagaagaattagaagtcattcataaaggtcttgccaatgcgaaaaatggttttaaagcagtccccggaaaactttatttaacagcaacgtatattgtccacaaaccaaatgattactttgacgaagaaatcaatattccgctgaatcgagtagcaaaaattcggggtgtccgcaccaaaatccttggaaaagaattactctccaacattttagaaatagacatgatatccggagtaaagtaccaattcgttgtaaacaaacagaaaaagtggctggaagcagtttctgaagtattagaaagccgcggtgaatcagaaaaattaggatagaaagaagctggcacgaaaaaagtgaccagcttctttttttacgctaaatgaaatgcagttgcaccaataagattggcatcatttccaaattgacagccaacgacagtagggctaatagtcgcaattggtacagatgcttttactttcgccacatattcggtcaactcttgaataaaatcagcccgttcacttacaccaccaccaatgacaactaattcaggatcaagcgcatattgtaaattaaaaatacttcgcgcaagataataaaacatcgtatctagctcttctttcgcgattttatttccttccgcacgtaattcaaatgcccgaagaccatctatactagctttcggaacttctaaacgcccggctattctcgtcgcagcatttacaacagtaccaagctcactaagcgtgtgtccgtcgcggtccatcaacatataaccaaattcaccaccatgcaaattagccccgtgatgtaccttgcccccgcgaataactgcgccaccaacaccagtaccaagaatcataaaaataatatcttgtttatctttcgcagcgccaatccaaacttctgctaaagctgcgcagttcgcatcattttccatcgtaacaggaagcccaagtttttcttcaagcaattgcttaaaagggaaattatgtatgtaagggatagcactagctccaccaatgataccggtttcattattaactgcacctggacaactaaacgcagcaccttggaatgtataatcgtaatttgcttttacatccacaagtgattgcatcatttcctccaaagtatccggggttttgaatttacctttttctagtatttctccagctgttgttaacacaccaaactttactgctgtaccacctaaatcaaatgcaagtatcgtcattacccaatctcctttataaaagtatatacttatcatacttttaaacaatacaaatgacaaatgaaaagtgaaaatactttgctaaaaattaacgcccttttctattttgtgctataataaagcaagaatttaaagcgcaggaggaaatggttagtggagataaaggttcaaaagaaattgactgacggcagaatcgcttttagtagtgaatatggtgaatgcgttggtatatgggccgatgaagacccagaaccaagtagggtttacacagtagaaattacgataccggacatgattagcgcagaactactacacgagagtgaagagaaacattgtgcactagaaatagacgaagaaggcttagttcacgtaattgggaagttagaggattacgaggaagatggctttgcagtactccgcttagaagaaagtattatttgttttgacacgaaattcagcgaagaaatcgaaatgctccatggaagatttgttgaatttgtgattccggaaataaaattgagtaatgttggtatatagattgaaatgaaagaggcaggaaacaggtagttagagtttcctacctttttttgttatttggaaggagtgtttgaataattattcattttattcaatcatgaaatataattaatgtaaaaaaataaaacaaataggtaataattatcgattaaaaagttattttatattagggaatatgaatttttagtgacgaagaaaaattgattgcataaaaagtgaatactgcttcatattgtgtaagattttattattgaaatggagatattactcatactgtgtaagaataaatctaaataaagccagttttaaggtattcatgacaagaatcagacatttcattacatttttggttatacattggctttttatgatacactcatcttgcaacaaaacataccaacactgcgacggaaacgtttattaaaagccgcaataaataaaaggaaaagagagctaatagaatgaagaaaaagtggttgctattaatattgtcagtaatagttctttgtgcaattatattcgggataaagtggttgttatatagagacaatcttgtagaaatgatgcaagttgacgacactttatatatagtgtcgtatgaaccagcaaagcaagaagatgctttagagaaaattggcgagatagagcatagaattcgccattaccggataccgaataaaaatttcacatctaattatttaagcgaagggacggaactttataaagcgaaaaatggagatgagtttccaagaactattttgtttaaagaggacggcgagtattttattgcatcagaggctatgaagtagcctaataaaaagcgctagtttattttttctcttaatagagaaagtttatcgtataaaactaaatggaacatatttaaaagtatttcatttttaagaaagcaatttataaagtcattgattctaaaattaagtatagcgaacataaaaaaacgccatgcttcatttccctaaaaaagggaagtaagcgtggcgttttttagctatatgtagtaaatacagcgagcattttttctaaatctttttcggatcttgcaaagagcatcaagcgttggcgattggtttcaatcacgagcacgccatcttcagataaattcatccgttcaatttttgcataagggaagaataacagggcataaaaaagtccggattctttgaaaacagctttcgaactgcggaagaagcagatatagatgaataacacacccataatcccaagcagtacagaagtggaaaaaggtccttcacgaaagaatgtattggaaacgaataacaaaacgataatccccacaaaaatataaccgtcccaacgaccacgagaacgtaatttgacacttaaaaccgtcttccctttccaaagcggaattactgcatcattatacaaaatgtacagcactgttaagatgtttgccgcgaacaaaaagatattagtagcatcccaaaccattttagctatcactcacaatctatcattgatatagtttagtaatattgtaacataattatgcgtggaagagggagaacagggtttgaggatgttgtagcaaaatacaatctactgctgagtattaataaaaatgtaaagatacgaatcaatatagggggatgggtactaaatgacagaaaaagatctagaaggactcatgctaatgcataaaagaattattgaaaatttagaagaattttctatgcctgccaaacaacaaatggaaaaattaaaaggttttgtacttactgatgaattggcatcagacttttccgatattgcattacaatatgcaaaaatattatttgaccacggttggttaacaaaagaacagctagatatgttccttattgtagacaaaaaattagaaggtatgtcaaacaacgaagatttttggagtgatgaagcattagaaactagtattgagtgggctgaatgtagtaaacaagggaaagcaatattgaaaacttttaggtaatagctttttattgtcagaatagggggcgaagtagaaacgagtaaataataaaaacttgttcatagaatagatgctgaatgagcaagaaatgtggataagacacaaaaaagaaccggaattttaatcccgattcttttcgaattattataaccatccattacccaagcggtgaatacccagctggtggaagtcctaagataccagaccagtaacctagaataccaacaacgaatagtcctaaaatcaaccataaagcattgacttttttcttgagtatccacatacaagcgaatgtgagtagaagggcaagaagacctggcattaattggtccaagatactttgaacagtagttggaacgtctttaccagttttagagtcttctgttgtataagctactagtggaacatagattgtggtccacttattaacaagggcgcccatgacgaatagtccgagaatggaagctccttctgttagtttttggagcagaccgccagacatatcagatacaacatctgtaccttttgtatatccgtagaacacgccccaataacggaaacctaggcgaatcgcattaaatagtacgaagaataagattggtccaataatactaccgtcagtggcaaaaccggcacctaaagcggcaagtactggacgaaccgttccccagaaaattggatccccaacgccggcaagtggtcccattagacctactttaataccgttgatagcaccgtcgtcaatatcagcaccattggctttttgttcctccatcgcggttgttacacctaagataggagccgccatatatggatgtgtattaaagaactcaaggtgacgtttgatagcttgttctctttcaggtcctttttcagggtaaagacgcttaattactggaattactgagaaacagaatcctagagattgcatacgttcaaagttccacgacccttggaagaggttggaacgtatgaacacgcccattaagtcacttttcgttattttcttttcattaactgtaatttgttcactcataatttttctccccctcccttagtcgtcaaggtcgtcgtcgagatcatccgctgatcgtccgccgccgcccccgccgtattgttggatagcttctttcaattgatatttagggtttagttggatgtaaatgattgctgcaactagtcctaaaacacctagtgctactaagttgaattgagtaaatgctgcgacaacaaaacctaagaagaagaaaggcattaaatatttagcggacatcatgttaataaccattgcgtaaccaacaacaacgataaatccaccagctacgtttaggccgttaacaataacgtccggaatggcattgagtaaattttctacggcgctagtaccaactgttaccgcaacgataacggctggaatcgcgatacgcatagcttgaagtagtagtgctgtaacatgtatccagtcgagactccgcagattaccttccttaccagctttatcagccatgtgttggaatgcaactgtaattgtacgaactagaattgtaagtacttgaccaagagcagctagaggaatcgcaagcgaaatacctacgctgatatcttgtccccctgtaataactaagatagtagaaataatggatgcaagggcagcatctggagcaaccgcagctccgatattcatccatccaagcgcgatcatttcaagtgttcccccaataataataccagttgtaatatccccaagaacaagaccaattaatgtacaggctattaatggacggtgcgtttgccactcatccaaaatactacccataccactaatacaggatacgaggaatacaaggattaattgtattgctgacatatatttccctcccaatttttctttagaatgataaaaaaagataatttcattatgatgactgaataaattaagcatctattacataagcttttattcatgaatcacccctttaaaggtcttcctttaaacgtttgctttttcggggctctaaaaataggcgagccgcggatgaattatttatctttatctagtaatgggataagtttgactttattgtcagatgcgactttacgaatttcaagttcaattcctttttcatctaatttgcggaatgctgcttcatccgtttcatcgacagatacagcatttgttatcatgtgtttgccttcgcggaatgccataccaccaatgtttactgttgtaatgtttacacccgcttctacgagggttagtacatctgtaggattagtgaataagagcatgactggagttgtagcatatttagggttgttgtatacgcggatacctttttgcacatcaacaacactagctttaacgcctggaggtgctacttgtgtaagaagtgttttacgaacttcatcttttgctacatcgtcactaataacgataatacgttctacctgtgtttcttttgtccaaactgttgctacttgaccatgaattaagcgatcatcaatacgtgctaagcgaatttccattataaatcgtcctccccgacttcggtttctatttttggtaatgattgtttgagtgacttaacgccacctgatcctgctgtaagagctgtttcaactagatctttttgattacttgcggcccgcatagagagcgtttcaagcaacattggaatatttacccccgttacaacatccatattgtcttctggaagggcgatttgactagatgcgttataaggactgccgccaaataaatcaaccataaaaatgacgccttcagaagtatccaatttgtctagtttttctttgtatttggtaataagcgtatcagtgttttctccagggacaaaggtaataaactctacattgtcctgtttgccgataatcatttcagttgatttcaacaattcacgcgcagcttcaccatgtgtgccaatgataattccaactggcataggtatctcctccttaagcgtggatataatcatccattaatactaacgcaaaaactgtgccaacatttctgtattaaacaacctcctttgctaatagaagcggttcaaggcttttgtaagcgtgtactaacagaagcggcgcgccttaatacgctaaatgcatagcttaatacactaagtactaatcttagacatacatacaacattaccctaaaagattagtcagaaaacgcaattgctgaaaataaaacaagccaacttatgaaaaatgttggcttgtttataattatgaaagtacttctggttggatttcattcaagatatcgtacaaataacatagttcgtcattcgtcagttttaagttcattttgtagataacttctttatttgtttgttctagtgctttaaaaatatttgtttcaagcatatcttttggttcgcggtagattaaaccatcatttagaaccatacgctctaaggcacaaccgacatgtatgagtagattgattttaaaggtattatcgagtttgtatcctagttttttctctagcacgctagcaaacgagcttagaatttcaatcgttttcttcggattgaggtaggttagaaattcgttaagactttcttcgataatttcttttgcaatccgaccagtttcaccttttttaacgataatgttacgctgtttcactaggctaacaagttgctcctcgccatcaattccgaaaagtcgttcgagcgggatgaaggggatttggattttcggatcttgaataccgaccgccatcaaaatatcattttcttcttgtagctgctccaacttagtatccatttcatgcaagccaatcggaattactttaatggcatctgtcgtaatggtatctaaaatattttcgataaacagttgtaatttttctgcagtaccttcgccagtcgcgcaaatggtaatgatggcgtgtggtttttgattggaatcaagtgtatcgtcatcagaattatagccaccataaccgcggaaatctttcaaggaatcgtaaatactatcgagttccatatcgagaatgttggatttgcgaactgcttcaataacagttgcggtggagaccatatcaatcgagcgaaccggaataccagtacgttccgaaatgactggagcaaaacttgtaagagagcccatatcgaccagaagaagtagaccgcgccccatatccatttctttcgcgcgctcggtcaatttatcaagcacgattttcggactttgatcaagaggcatatcgattccttccacgagtccttcaccgagtagttttttcgcaacactaaccatgctactcgctgtattattcccatgcgttgcgacaagtacagcaacacgagcattttcttgttcttttaaaagggaactaatgagtagtgttaaatacataacttccatattaggaacccggatgtggaaagtagcctcaatatcatccttaatttcccgtgataattcataggcttccggttgatcattgactacattttcgatattcgtatattttaacggtttgttactttcaattcgtttaataaaagaggtaaggtgaaggctaaacgcaagcaagaagcgctcatttaactttttaccaagctgatgttcaattcggagttcaacaccttccgcaaaattcaggatttcttcattgactatttttaagatgttttcgcgattgtggatcgtatttttaaacttattgtaaaagctgttaaggtgaatatcgatatccatcttgataaatttcttaatatcatcatcttccacaccttgatccattaaaatcgatgctttatcttcaatgattttgtaaaggttgaaattcggctcatattcgtccgatgtaatcaacgtattatttagttcagggaaaatcgtcgtatatggctccaagtattccgcaattgcttgaagttccttgcggcggttactgaagtggaagaagccgtctttaatattgatcggcaacgttttaaaatcaatcaaaatttcttcgtctttatcgaaactattaagaaaaccttgtgcgcaaacgagttgaatgttagattttaattgcccgatatttccgtaagttgtattaccaatcagcgctttggcagcttcatcttcaatacgaattggtttattaactcggtgcgcttcactagaaagtaagtattttaaaagttccacacgttcaaacgccgtacgttcttccaaacttggcagcgtaataataatcggaatacgacgcataaatgtttttaaaagcgaagattccggattttcggtagtagcaccgataattaaaacgtttgattttcgtgttcggtcggtttcgccaagtttattatacgtaccagagtccatcaagtaaaaaatcatttcctgaccttctggtgggagacggtgaatttcatctagaaataaaataccgccttctgctttttcgacaagcccgcctttatcattttctgctccagtaaaagcccccttaacgtgtccgaaaatgtgtgacatcagaagttgcgggttattatagtaatctgcgcaattgaaaataataaacggcgcgtcagcaggtagacgtttggcatgttgcgagaagcgatacattaaattagcaaaaagcgttttaccaacaccggtttgtccgagaatcattgtatgtaaaccatttggtggatagagtacagctgctttggcctgttcaacaggagttttgagactgtcattaacaccaattaaatcatcaaaaggacttctttcaacgatgcttggtttgagcatttttaagaggggctcacagctgtcaaattctaattcattatcagaaagtgtacgcccaatttcatcttcaacagcttttttaggaaaataaagcactggtcggccaacgattttaatgatttttccttgtctgtgaagttcattcaattccatactgacattatttcttaaaatagataatgtttctgaaatagtactagctgtaaaaccttcattctgctctaattgctcgcgaatggtcttagtggaaggattttctaaaataaattcataaatacggtcaatacgcttcattataaaacctccatttagtgtatcggtgcacgattagtgtattataaacgattaatacactctggaattctgtatttatcttagcatgactagtgaaaatgtcaatgtttatttaccaaaaatcaaattgactagctacacgtatagtactattatatagaaggaacaaataaaatcgatgaggtgttcataatgtcaaaagtactatttattaaagcgtcaccacttccaaatgaagtatcaagaagttcgcaagttgccgaaacctttatggccgaatataaagcgaaaaatccttctgatacagtagaagaattagttttatataatacagaagtaccactattagatttagaattaatgacagccggtagagaattacaagctggcaaagctttcactgatttagcaccagatgtacaaaaaaaattaaatgcctataatgcgcttacggaacaattcttagcagcagacaaatatgtttttgttttcccactttggaaccttggaatcccgccattattaaaagcttatattgatacttttgttattgctggaaaatctttccgttatactgaacacggtccagaagcacttttaaaagataaaaaagcaatcttaatccatggtagcggtggcatttattctgccggaccaacaagttcatttactcacggagaaccttatttacgaactattttacaatttattggtattaatgtagtaccatctatttttgtagaaggaattgaccataatcctagcaaagaagcagaaatcgttgcagctgctaaagcggtagcgcaggaaagtgctacagaattctaaaaagtttgtgaaaaatttattttcactaatgatattaagatagtattatcaactatctagaccaatacaaacgcataaaaagattgctaatccctttataaattggtaaagtagagaagtagattgatcgataaagtgctgaattaactcggcactttattctttttaattactcgaaagggatgaattaggatggaagagcaaaaagaagaattgcaaagagggctgaaaaatagacacattcagttaatcgcgattggcggagcaattggtacagggctttttctaggagcagggaagtcaattcatttggcaggtccatctatcatgttagtttacttaattattggggctattttattctttgttatgagagctttgggtgaattattaatacataacccaacaacaggatcttttacagaatttgcagagcaatttattggaccgtgggctggctttattacgggctggacatattggttctgctggattgtgactggcattgcggaaattacggcagttggcatgtacgtaaaattttgggtgccagatttaccgcaatggattccagcacttgcatgtgttttgatacttctattgtttaacttggcaaccgttaaagcttttggtgaaatcgaattttggtttgcgattattaaagtggttgtcattattgccttaattgttattggatttgtactcgtgtttattggttacaaacatggcactagtacagcatcattttctaatttagtagattatggtggctttttcccaaatggaattgccgggttcttattagcatttcaaatggcgacattttcttttgtcggaattgaacttgttggggttaccgcaggagaagcggatgatccagagcggacccttccaaaagcaattaacaatattccgattcggattttaattttttatattggcgcactactcgtattaatgtcgatttatccgtggagcaatattgatccaaacacaagcccattcgttagcgtctttacgatgattgggattccagcagctgccggaattattaactttgtggttttaacggctgctatgtcttcctgtaatagtgggattttcagtacgagccggatgctttatactctttctgcagaaggaaaagcaccgaaaaaaatgcatcatttgagctctaatggggttccggcaacagcgttaatcacatctacagcatgtttacttattggtgtgtttttaaattatttcttaccggaacaagtatttatattagtaacaagtatcgcgacgatttgctttatctgggtttggggagttattctagtggctcatttacgttttcgtcataaacatccggaaatctcagaaaaaagtaaattcaaaatgccattatctcctttaatgaactgggttagcttaattttcttcggaggattactagttatccttggttttgcagcagatacaagaatcgcgctctttgttacaccagtatggttcttgattttaggtatagcttatcagattttaaaagcttccaatcgaaagacaaaaattcgacataattaacaatcaagcaagcattcgctaaatgaagctattttagggaatgcttgctttttttactgtcaaaatgctccgcgaaattctttacaaatgaaaaatatcgtgtagaatgataggtgtttagagcattttgtcgtatttacgcatttcgagtgagtactcactcatttttaaacaactatttatgtgaagcgaagtacaattaacggatgatatgtgaaatcatatacatattaagtagtgcgtaacgaaagggatgagaaaatgattcatgcaggattagatgtaggatcaacaacagcaaaggccgtagcacttaatgaccagggggatattttatttcaaacctacagaagacattattcagacattaaaaaagtaacattagaaatcatgcaagacatgcaaaaaaaatgtggcatgacagaaatgacattcaaaattacgggatcatcaggattagctatttctaaattcttgaatgtaccttttgtgcaggaagtaattgcctgtacggaagcagtggagcaagtaattccagagacagatgtagtaatcgagctgggcggggaagatgcgaagattatttattttagtggtgggattgagcaacgaatgaataatgcgtgtgcgggcggaactggtgcttttattgaccaaatcgcgacactacttcaaactgatccaactggtttaaatgaactggcgcaaaatgcaaatacaatttacccaatcgcttccagatgtggtgtgtttgccaaaacagatgtgcagccattacttaatgaaggggcaagaaaagaagatattgccgcctcgatttttcaaagtgtagttacacaaacgattagtggacttgcttgtggacgtccgattcgcgggaaagtagcgtttcttggagggccacttacattccttgatcagttgcgctatcgttttacagagacacttaaaatgagagatagcgatattattgcaccgcaaaatgcagaatatttcatcgcactgggaactgcctttacagggcttaatgatattcctttaaaagtggatgatatgatacaccgactttccaatatggatatgacaaccatggcgactgatacggtgattttaccagcccttttcgaaaagcaagaagacttagaagattttcgtgcgcgtcataatcaaatgaaagcaaaacgagcaaaactggaagattatgaaggagatgcttatttaggtattgacgctggatcaaccacgaccaaattaatcttaatgagccaaaccaatgaaattctttactcgttttattctagtaataatgggaatccgcttcaatctgttattgatgcaacgagtgatttatatgaaattttaccggaaaaagttcgagttgcgcagtctggaattacaggctacggcgagtcgcttattaaagccgcgctaaaaattgatgttggcgaaattgaaacagtggcgcattatcgtgctgctcgtgaatttttacctgacgttgattttattttagacattggcggacaagatatgaaatgtatgaaaataaaaaaaggtgcgctggatagcttaatgctgaatgaagcttgctcagccggatgtggttcattcctcgaaacatttgcgcaaacacttaatttatccattgaagaatttgctgctcgagcactggaagcaaaagcccctgttgacctaggttcacgctgtactgttttcatgaattccaaagtgaaacaagtgcaaaaagaaggcgtgagcatggaagatttatctgcgggtcttgcttattcagtcgtaaaaaacgcgttacaaaaagtaatcaaactgcgtagcccgaaagacataggcgaaaaagtaatcgttcaaggcggaactttttacaacgaatcggtcttgcgtgcttttgaactgttaacaggacgtgaagtggttcgaccagatatcgccggaatgatgggcgcatacggtgctgccctaattgcccgcgagcattatgaaactggcgaagtaacagaaatgctcgtactagaaaaattgcgtgaatttagcgcggaaacttcgcagtcgcgctgtaacctttgtagtaacacgtgtcagctaacagtgacaagatttggtgatgaccggatgtttgttagtgggaaccgttgtgaacgcggagaacgtgtcgaaacgaagcgtaatttactgcctaacttatatgcgtataaattaaagcgtacctttgattataaatcgctgaaaaaatcagaagcaactagagggaccattggcattccacgtgcactgaacgtttttgaaaactatccactttggcatacgattttaactaacttaggtttccgagtggttttatcatctaaatcatccaaaaacctatacgacaaaggtatcgaaacgattgcctcagaagcagtttgtttcccagccaaattaacacacggtcatattatggatttaatcaagaaaaaagcagatcgtattttctatccatctgtcgtttatgaaaaaccagaattcggtgaagcaacgaataactttaactgtccagtcgtggcgggttatccagaagttattcgtgtcaatgtggatgctttggaagaaaagaacattccaatgattagtccgtttttaacgttagataatgaaaaagcattaatcgaacaaatgagcctcgctttcccagaagtcccagccgcggatatggaaaaagccgtccaagcagggttagaggaagcagaactttgccgcaaagacattcaagcagaaggagaagcggcacttacttacattaagaaaaacaaaatcaaagggattgttcttgcagggcatccgtaccatattgatcccgaagtgaatcacggaattccggaacttattacgatgaatggcatggcggttctaacggaagattcgatttctcatcttggagagattgaccataaacttcgcgtcgaaaaccagtggaaatatcacgcaagactatatcgtgcagccagctttactgctaaaagtgaagatttggaatttgtgcaattgacctcttttggttgtggacttgatgcgattacaacggatatgtgccaagaaatcattgaagggcataacaaagtatatacattactaaaaatcgatgaaatcaataaccttggtgctgctcgtatccgtgttcgttccttaaaagcagccatggaagaacgtgagaaaaacaatgtgaaaccagggattatggcaaaaccaaaagaacgtccattattcacgaaagaaatgaagaaaacatatactatcttagcgccacagctagcgccaacccattttgaaatgttggaggctgcttgtagagtgggtggttataatttagaagtattaccagcagttacacctcgtgcggtggatgaaggcttacgttatgtcaataacgatgcttgttatccagcaattttaactattggacaaatgatggatgcactaaaaaatggcgattatgatgtaaataatttagctgttttaatgacacaaacaggtggtggatgtcgggctaccaactatatctcgatgctgaaaaaagccctcggagaagctggcctggatcatatcccagttatttctcttaatgccaacggtttagaaaaacaaccaggctttaaaatgacgccaaaagttcttgttcgtttcctagccggaattagcttaggcgatgcgctcgaccggatgctttaccgtactagaccatatgaagtggaaccaggaagtgctaataaaatgttccgtcattatcttgatgctggtcgtgcgttaatggaaaattattcttttggagcatataaaaaattagcaaatgaaatggttcgcgcctttgacaacttaccaataacaaatgaagtgaaaccaagagttggtgtcgttggagaaattctcgtgaaattccatccgggtgcaaataacaatattgttgatgttattgaagacgagggcggagaagcggttgttcccgatttaacagatttcattttatattgctgttatgacgatcactttgcagctaatacatttggtcgttccaaagtaaaatcattcgcgaaacaaagcgtcgccattccactcattaatcaattccgcaaaccagtgacagatgcgctgaagaagagtgaacgctttgaagcaccggcgagtatcgaatctatcgctgaaaaagcgagtcaattactatcactcggaaataaaatgggtgaaggctggttcttaacaggagaaatgtttgaattactcgatagtaatgtaccaaatatcgcgtgcttacaaccatttgcttgcttgccaaaccatattactggtcgagggatgattaaaggactcaaaaaaatgtatccagaagctaacatcatgtcaattgactacgatgccggctcaagctctgtgaaccaactaaatcgaatcaaattaatgctctctatcgcaagaaaacaactagaaacgacagaagttgtgacagaaaaagaaaccaatacaagattcaatccaagagaaaaaatccttggtaaagcaaaacaagtaagagaaagtgcgccagtcgaaatgattggaaacaaagtaaaacaagcgagggatgcagacccagttggggctattgcacaaaaagtgaaacatgttgcaactagtagcgagcatgttcaaacggataatgattaattaaaaagcagcccattgtattgggctgcttttttctattcaatacttaaatatttagtttcacaataatacccatttccacctacatatacacgggctatttcgctatgaacatttacatctaatttaactaaaatctcggaaggagagtgtagtgagtgtccttgttcaaatacataaagttctttttgcaagtattgattttgataaagataacaggccaaagcaccattagaggtcccagtcgcagcttcttcattaatgtcaaatagtggagcgaaattccgacaaataatccggtcatcactaaaagtatacagatgcattccgaccacttcataatgcttactgactttttttacctcttcaaaattcggctctagggtatataaatctgcttcacttttaaggggaactaatatatcctttaaacctgttgacacaatttgaataggataatgagtatttagtaagtttaaatcaaaacaaccagttaaattattggcgggaattgtctcataaaaagttggttgattttgttccatgaagatagtgccatcttttattgtaatcgtcagtacaccgctatttgtttcaattgtatactggctcttatgaattttatttaaatgcatcaaaatcgcgaaagtgccaattgtcgcatgaccacataaatcaatttcttctttcggagtaaaatattctaatttataatcagcacagttagattcagttaggaaggcggtttccgcaaagcctagttgttttgcgatagccattttttgagtgttggttaatgttggttcatttaatacaacaccagctttatttccacctatattattcttactaaatgcacttgcaacataaacagatatatccataaaaacgaaactcccttgttaaaactttattcttccgtaatcatcgcaaactccgcacgaactacctttttcaaatcagcaggcgctagttcgatttgtagtcctctttttccagccgaaatcagcatggtatcaagcgattcagcgctgttatcaataaacgttggaaataatttcttcattccaatcggtgaacatccaccgcgaatatagccagttagtttctctaacgaatctaccgcaatcaattcacattttttattaccgctaatctttgccaaatgttttaaatgcaaagtcttatcggcaggaatgcacgcgacgatatttcctgttttgtcaccagtcaggactaaggttttaaaaatctgtgcgggattattccctgtttcttccgcaacgtgaagcgcatcaagggaatcctcgctccacgcgtactcacgtaattcatagtttaccttctgtttatctaaaatccgacacgcatttgtctttttattcaagtctttcacctcaattaattcagaaatatgtacaatttatgacactttttgtgaaatagttggcttttcccttttcattctgtacaatgaagtggaattcaaataagagagggagatttactaatgaaaaaagggttatttagtatggttcttgtgctagcaatggtacttgtattaagtgcatgtggcgcatcaagggtagaaccaaaaaaagcaggagaaatcacagttaatgccgtagtttacaacaaagatacggataaagtaaaagacgtatacggtgaagatggttctaaattcgaaaaagaatttgaaactagttttaaagaaagctttatcagtacttttacagcaagtttttcaagcgatgtcaatttagacaaacaagtggatgagttttatgatgcgcttcgcaaacaagtaaacgaaaaaacttcgtatactactaaagtaacaaatgatgacaaagaaagtccagaaattcaattcgctattaaaggccttgatatgaaaggcgttcaaacagaattagtggaagaattaacaaaagcagcaactgctgatccatccattgcatcagatgatcaaaaaatggctgaaaaaacaatggaaatctatacgaaagctgttcaaaatgcagatgcagtatcagaagctaaaacagttacacttaaattaaaagcagatccagatgacgattctttatggaaaatggaaaacgatatggcattcatgcaagaattaacaacagcgttctttatgggcggcatgtaagtttttatatgggaatacaccaataactttcaggttgttggtgtttttttgtttttaagaataaatgttataataacactaagatttattaatgggaggtgctatatgactactataaaaatcgcattaatccaacaaaaagcagtaccaaataataaagaagccaatttgaaattagcaattcaatatataaaagaagcacatgaaaaaggggcagatttagtgcttttccctgagatgtggtcaaatggttatgcgccaccttttgaagatgcttttaatcatccactagctactggttttggtgcagaacgatttaagtggttagatgaagcaatcgcggcagacagtgcttatgtctcgacactgaaaaaacttgctaaagagttacagattggcatttgcgctacgtatttgtctaaaacggaacagaattcacaaaatactgctattattattgaccgaaaaggagaaataattttagactatgccaaagtccatacgtgtgatttttctttagaaatcttactacaaagtggggaggaatttaaagtttgtgagtttgatggtattaagctaggggtcatgatttgctatgatcgcgagtttccggaaagtgcccgaattctcatgttaaaaggtgcagaaattattctcgttcccaatgcttgtgatatgaatccagccagactgaaccaactaaactctcgtgcttttgaaaacatggttggcgtagcgatggcaaactatcctggcgaaaaatggggcagatccactgctttttccccgattatttttgatgaaaatggggattaccgcgataatacgattattgaaacagatgacttttcagaaggtatttttattgctgaatttaatttagacgagattcgaacttaccgggaaaatgaaacgtggggaaatgcctatcgaaaaccgcatacatatacagatttaataagtttagatgtaaaagcgccatttaaacgaaattaaaaaaacagagatgagcgattctctgttttttcttttaaaaataataaagtccggtaacaatcaacgcaacgactaaaatccccggaacaagattcgcgacccgaatcttggttaaaccaagcaagtttagaccaattgccaaaatcataatcccgcctgtagctgttaattcttttataattagtgccatcaggtctgccggaacgaattgattaatctgggttgcgaataacgcgataataccttcaaagaggaacactggaatcgccgaaagcataacaccccaaccaagtgttgtactaagaagaagggcgataaatccatccattactgatttcgtgtaaagcacatcatgatttccgcgaatgccgctatcaagcgcaccgataattcccatcgcaccaattacgaaaataagtgtagctgtcacaaatcctttggaaacattactttttcctttggcaccgactttacgttcaatccagtgcccgagttgattcagatggtaatctatattaagccattccccaataacggctccaaaacaaatacttaaaatgacaataagcgagttgctcgttttaaatgccatttgaatgccaaggacgataacggataaacccatccctttcatgaccgtgtctttcatacgttcagggatattatgtaatttcatgccaataacagagccaatcaaaatcccaagcccattcactagtgcaccaagtagaaccattttcttcctcccttattttgcatatagcaatagtatacaggaagttttcgccaattgggagttttatttcgtacaaaaaagtcgaaggatcaaagtgatccttcgactttaagtctattttccggctactgtaaaacgttcgtttaagtgattaggtcgttcaatttcatctaaaacagcaatcgcatagtcttccatactaataaaactattgccatcgctaccaaacaggagatgatcttttcctatttgatagtcgccagtgcgttcaccgggctcaaacatggcagaagggctaatatacgtccaactgaattctgcttgatgtgatcttaaatgctctaattgtttcgcttgcgcacgtgcagttggatagtaaggcgcttcccgtaggcccttggactctaaaagcgtgtttccgtcttcatcaatttgcagactagctgctccgccaacgacaagtaagcgcggagacacagttccatttaaaacagaaattaagtgatcaagagaagtgacatgtttttctgcttcgtctggactgacgccataagcatcaacaacgacattttggtctgataaatctgaaagggttaaatcaaaaatatctttttgcaaaatattaatatctttgtgtgtttgcgtgatttttcctgcgtttcttacaatggctgttacttcgtgaccacgattttttgcttcttctaaaattctcgaaccagctcggcccgtagcaccaatgataccaattttcataaaaaaagccccctattcatttttatggaatagattctcgtttgatagaagaattattcccgaaagaggggactgggaaacatttatttttttgcggcgtttgctaattgtttgattttggctgcggaataaatgtgagaaatcgtgaaaataatcagtgctaaccaaatgaacatgaatgcaaacaattgcatatgatcgaaactttctttaaatagtaatacgccgagtgcgagcattaatgttggtccgatatattgcaggaagccaaccattgtatagctgatttttttcgcagcagtggcaaacagaaggagtgggatagctgtaacgacaccagcgccaactaaaataatattggtttgtgccgcgtactgcattaatccattggtcgcgaaaaagattacataaataagcgcgaatggcgtaataatcattgtctcaagggttaaaccagtccaaacagacacggaaacgacttttttaattagcccgtaaagcgagaaagtaacagccataccgattgccgcccaaggaacagagccaaggtgccatgtgagaattaaaacaccaattgttgcagaaataacagcgataatttctccacgactcaagcgttcttttaagataactgttgcgagtaatacgtttacaagtggattgatgtaataaccaagacttgcttcggtcacatgcccactattcaccgtataaatgaataaataccagttcgctgtcactaaaaaagctgccgcaataatcgcaatcagcgtttttggtttaagcaatacgtcctttgtttcttgaaaaaccatcgaagcttttcgcaaacaaacgatcaaaaataacataaaaataaaagaccatataattctataggccaaaatctccattggtgggacatttgtgactagcttccagtaaatcggaaggacaccccaacatacataagcgagagcgccagcgataattccgcctagctgtccattttgtttattttccatagcgatgttagcccccttttttaaacaatagaactattttagcttaaaagggggaataaagctacaaaaaaactacgaataggctaactattcgtagtttccacaattatttacttgcttcgatttggatgtttaatttcacttcgtcgccgataagtacgccaccagtttctaacgcagcattgtaattaaggccaaagtctttgcggttgaatttaccttttgcttcaaagccagctaccatgttgccagtatttggatcttttcctgttccttcgtagcttacttctagtgtaagaggtttggttacgtcgcgaatagttaagtcaccagtcacttcgtattcatcatcgccgtccgctgtgatttttgttgccgtgaaagtcacgtttggatatttttctacattaaagaagtcttcgcttttcaaatgtccatcacgttgcgcttgacgagtgtcaacagaggctgctgcaacggagaagtttaattttgcagaagttaaatcttctggatccatttcgatatccgctgtgaaatcgctaaatgcaccttttacttttgataccatcatgtgttttacttgaaattcgattgaactatgtgctgggtctacgttccatttttctactgtcattgtttcattcctccaaatatgttttttataaaagcattctcttataatctagcctaaatcttaagaaattaaacctgagaaaaaatacttttacgccttagaaaagcaattgcttaactgtttataagtaaactatatcatacttacttttaataagcaactataaaaacgtattagaaatatatttttttcgtaaatatgattgagttttttggttaaagtgcgtagaataggttacaagaggaggttggatgatggtaggaattaatacagatacagaaaatattagtgaactattaaaaacttattggtcaatccagcgaatttcagcgggatatgccgatcaaaatgcagcgagtttaggattaaccattcagcaacttgccatgattaatgtgatttacagcacacctggtatttcagtggcggatttaacgaaacgattaattattactggaagttcggctgcagctaatgttgacgggttaattagcctaggtttagtagtgaaattaaacaaaacaattccaaatgacagcatggatttaacactcaagctttcgaaaaaaggagaagacttatcaaaacgctctactgcaaacgcttttatgtacaaagccatgatgaaagtattcgaaaacctgaccgaaaacgaaatagaagaattaattcgtctaaataaaaaagtcgaaaccttactgaaaaagagtaaataaaaacatctcctgtatcattcaagtaaaaatgaatgaacaagagatgtttttttatttttgatcaaatttgcagtcttccagtggaataactttagttttatttgtaaatttaaaagatagccaaaaaactaggaaaatgggaagaccgatatacgaaatgccgattttttgccaccaagccggattcgtaaattctggttttaaaaatgccgcgtaatcttgaccgacaatgactaaaatacataaaacaagtgctaaaataggtccgaatgggaaaaatttcgctttatattttagttcacttaagtcatgcccttgtttgataaatgcttttcggaaacggtaatgactgatagcgatgccgacccaagcgataaatccagttaaaccagaggcagaaagtaaccacgtataaattactgtgccattttctgttagcgttgtaatgaatgtcatggcaccaacaatcgtcgtaacgattaatgctgccatcggaataccacgacggtttacttttcccaagaatttaggtgcttttttatcgcgagccatcgcccaaagcattctggtggaagcgtaaagacctgaattaccagcagatagaacagaagtcaggataaccgcattcatcactgaagccgcaaatgcaagaccagctttttcaaatacgagtgtaaatgggctaattgccacatcagttgcctcggcactaagtaagttcgggttagtataaggaataatcatcccaataatgaaaatcgcaaaaatataaaataacaaaatccgccagaacacttgtttaatcgcttttggcacactggtttctggagtagcactttcacctgccgcaataccaaccatttcagtcccttggaaagaaaatccagcaattaagaaggtacctaagatggcaaaaaaaccacctttaaacggagcatcgccagctgtaaagttagaaaagccaataacttcgccgccaagaattccaacaatagttagcacgccgacgataaggaaaataataaccgtggccactttaataatcgaaaaccaatattctgattctccgtaagcttttaccgaaagcgcatttaagccaaaaatcaaaattaagaaaatcgcgctccatagccaagcaggagtattcggtagccaaaattgaacaataatcgccgcggtggaaatatcgactgctagcgtaattgcccagttaaaccaataattccaaccaagtgcaaacccgaaagctgggtcaacaaatcgactagcatacgtactaaatgaaccagatacaggcatgtaagtagccatttcgcctaaacttgtcattaaaaagtacaccataatcccgattgcaacataagcaaccaacgcgccaccaggtccggcagtatgaatcgcattaccacttgctaaaaataatcccgtcccgatcgaaccaccaatggcaatcatggacaaatgccttgtttttaagtcacgacgaatctcgccatgtgtttcttttttcactataaatctccctttctattatcagaggaagtgcgcaaaaacagccaatctgcaagaaattggctgttacgtattttaccaacatcattttgtcagatagcacacctataagaaatttcgacaaattcttatagcagtccagcccctttaggaaactgtcccaacaactatttctaaacaaagagaaaatagtcacttcggcgatcaacctgttcattctttgtcgtcggcgtctttgtttcgcctcgaaaaaattactagtgcatctcgcaacctctacctcaccatttggatgagggtttatatttgattatttacccataataacggaaaacgggctattttgcaatatcttttagtaaaattgtaatgcttctttgattgtgctgtaagtagttaagctggctaggttttcttcgtagcgaattaatgtcatggcgaattttggcgaaattccggtgatgataagttctacgccagttaatttcataaatccgtggaactttacaagattcattactgcatcttcattaaattcggctaaaccagaaagatccataatcaaataatcttctttgccgtgatccatgtattcactcacatattcagacatatgctgaaaacggtcgtgtgttagcgagcctatcagtggtaatacacaaatattttctttaatcggaacaattggcgtggaaagtttctcgatttcggttaatgatttctcgagttccagctgatagtcgtgctctgttgtcacatctttttgaatgccgacaaaatacaaatgttcatgatcatcgtaaatcggttcaatcgtaagttcattcataaaagaagttccatcttttcggtaattttttagtaaaacattcgcagttgatttttcgttaatggcatgacggatttttgcaacttcttctttgtcagtatcgtctccttgtaaaaagtgacaattggagccaagtgcttcttctttagcatagccggtaatattttcaaaaccagtgttaacaaaaataattggattatctttttgctcaggatccgtgataattactcctacactagacaaatttaatgcttttaaaataacatcgaattgtggataagcggtcatctgcgtgtttctccccctttgtaaatacattcctatcataccacgcaaatgaacgaaaaaccaatgtctaatttgtgaatttaatcgtatgtgagcagtgcggaaggaaagctggaagtatgagtgtataatggagttagaggtgataagttatgtatataacatttacagatagcgctaaaaatcggcttgctgcactacggtcgaatttagaagggcggctacatttgtattatgatacagaaggctgttcttgcgaaaatagtggtattttcacattgcgactggtagaagagaaaacagcggaagatgacgaaattcaatcaaacattggtccagtgctaattaaacgatggacagaaatgtttttagaagaagcattaactatcgattataacgaaacggaaaaaacaatgattctaaaaagtgatggtcagtattataatcgtaatttattgcttgtaacggataaagatgaagtgattagctgtccgattagttaatgaaaatgtctaaagcttacagattatatctgtaagcttttttgtcggttttttgccatagtttagcagtggatactcttagtttgggaaaaaaactttttcttaaacatgtattataagtatagaggtaaaacataaaggagttaactgaatgaaaaaattatgcaccgtaatattatttttgactttgttattaaatggctttgttccgaatgcgcatgcgaagactgaatcaccatcagctgataataatttacaagtagcaccaccagctgcaattaaagatctttttccagatcctgccatggctaatgaagttttaaaatcattgaatcttaaaaaattaaataaaaaaagcactagtgatacagtaacgcaaactgaattaaatagtcttactggatcttttcaagcaattaataaaggaataaaatcaatagaaggtgtggagtatcttcaaaatataactgaactagatgtagagaaaaaccaaataacagatatagcaccagttgcaaatcttaagaaattgaccacattgctaattaatactaatcaaataacagatatatcaccagtggctgatttagctaatttaactactttctattgcggaaataaccctataagcgatattagtgctgttcaaaatctcactaaattgtctatttttaattgttacacagctaatgtagaagatattagtcctgttaagaatcttgttaatctaaaaacattaagtttaggaagtaacaacatacatgatattagtgatatagaaaaattaactgctctagaatatcttagttttagtaataatccagtagaaaatccagaagttatcggtaatttaacaaacttaaatacattatggttatataatgcacagattagaaatattgatttcacagcaaatttacctaaattaaaaagcgtttatttgtataataatcaaattagtaacattagtgaagtgagtaattgggcaaatattgagtatttagaactgaataacaatcagatcacagatataactccagtagccaatctaactacgcttaagacactaaagttaaatgaccaaattattactaatcgagaaataccttttcaaaaaaatatttccattgaaaataaagtaatggataattttggtaacatagtaacaccaaataatattagtgataatggaacgtataatagccctactttatcatggaatttaaacgaaacaaaagacaatctttcttatgactttactacaaaaataacgattttaaatataaatgcgacttattcaggaacagtaatccagccattaacaaaagacagtactcggccgataattacagcagatggaaaagtcagctatccagagggaacaacgaaaacgactaccgaatttttaacagatattcatgcgacaacggatgatggtagcccgattgaagtcgatttaaatgcgttggattttggtacagcagggagttatacagtgacactaactgcagtggatacagcaggaaatgaggcaacaccagtagacgtcactattattattacatcagtagatacaagtaaacctgtcattacagcagatgaaaaagtcagctatccagagggaacaacaaaaacggctgccgaatttttaacagatattcatgcgacaacggatgatggtagcccgattgaagtcgatttaaatgcggtagattttggtacagcagggagttatacggtgacactaaatgcagtagatacggcaggaaacgaggcaacaccaatacaagtaaccattattattactaattcgaaaaaaatagatccaattattccagttgaaccgggagggaatgatgtaaaaccagaaaagccaaatgaaataattattcttccaaaagattcggaaatacctttatccattattccaaaagataatatcgaaaaaacaaattcaatcaatgttatcaaaatgatagaaacaaatgaaataaagaataaaatgctccctaaaaccggagacaaattacctcttacagtatttttagggatgcttattactttagcgggtatttcttatcttcgaaaataacaatttttttgcctagaataaaaatttattctaggcttttttatgaaaatttcatgagaaagtggtgaaactttagacatatagttacactgatctctattttgtagtaacatggaataggaagtttatacatatggaaggagtgtcaccatggaacaaccatcagttgatgagctgaagaactggcgaaatgttatgcttcttcatcgttttgcgctagaagaagtgaatacgaaacttaaaatattgaatgaagaatttcaatttattcatgattataatccaatggaacatttgaagtcacgtgtgaaatcactcgaaagtattggggcgaaattagaaaagaaaaaggttgatattaccccagaaaatgcactgaaatatgtgcacgacattgctggaattcggattacttgttcttttgtttcagatatttttagaattcacgaaatgcttgcaggacaaagtgatatcactattaaacgagtaaaagactatgtaacaaatccaaaacctaatggctaccggagtttacatttactctgcgaagttcctgttttcctgacaaatcgttcagagataatgacagtggaaattcaaattcggacggtcgcaatggatttttgggcgagtttggagcataaaatttattataaatatcaacaagaagctcctgttgagttagttaatgaattacaagatgccgcacgaattatcacccatttagatgaaaaaatgaaaaacttaaatgatcaaattgataaatataaaaaagaaaaagaaaattaatctaatatggagctttatttctttgcaagtgagatggatgcaaagaaataaagctgttttatatttgcgagatagtttattttgcttcataataatataggagaaaaatgaaaggggacgatacatattggagatatttttatatgttttagcattacttgtagccatctttatttctaatttactcaaccggtttgttccctttgtttcggtaccgctgatccaaattggtcttggtgtattaattgccattatgccgattacgtttaatttgcaattaaacccagaactttttctagtcatgtttattgcgcctttgctatttaatgatggcaggcagactgataaagcagctctttggggtatgcgaatgccgattttagtattagcgcttggactggtgtttgcaacggttgtcgtgattgggtattttgttcactggatgattccgacgattccactagcagctgcttttgccttagcagcagctcttgcgccaacggatgctgtagcagttagttctctttctgggcggattaatttacccaagcggattatgaatttgcttgaaggtgaggcattaattaatgatgcgtcaggactagttgccttccagttcgcgattgcagctatggtaaccggcgtgttcagtttaatggatgcgagtattagcttttttgttatagctattggtggtattttagtcggacttattttgagttggttaaaattccgattgttaaaatgggttcgcggccttggaatggaagatgttacgtttcatatgcttatccaaattttgacaccatttattatttatttagcagcggaagaaatacatgtttctgggattttagcggttgttgcagctggaattatgcattcaatggaacaaaagaaaatggatcctcagttggtgaaattaaatgtggtttcgcagagcacttggtcggttatcatttttgttttaaatggcttagtatttttattattaggaacacaacttcctgcgattacagaagtagtgtggaatgattctggaagtagtaatttacaagtaatggcttacattttgtctatcacggcagccttaattttactgcgctttatatgggtatacatatcgtggagcatcggcgcgaagcaaagacagaaacaaaataaaaaaacacaactacctaaatttagaccggttgtacttacatcgctttctggtgttcgcggggcagttacacttgccagtgcgctcgcaattccatttttcttagatgacggatcactatttccgcagcgctcactaattatttttattgcatccggtgttattctttgtacattagtgattgcgacatttattttaccgttacttgccaaaagtgaagaagtgacaacggaagatgaacgagctgaaattgcaacgcggattcgaatcctgagaaacgtgattagagaattaaaagagcagacgctacctgaaacgaaagcagcaacggatgaagtaattgaagattatcgcaaaagaatttacgatttacagcaaaataatagttcgaatcgaggcatggatgaaagagaacgtgcgaaacgattagaaatcatccagtgggaacgtgaaaacacccaaaaaatgaccgatgaaggacgcattgttgctacagatagttatcgttatcaacactatcttaatatgatggaacaagcaatcaaacaacgcttccggacaaaagtaaaaacagcatggatgttcctttatcgtctaataatgcttgtcattcacccgaaaaaatggggtagaataacgcataaagtgaaaaaaggtatttctaaagacagcgaacgattccaagcaattcgccaattacgcgaagataatgaaatacttataatttctaaactcaaagaacaattaacgaaagagaatgttgatataattggaccactaattaccgaacacactattttcttagaacgcgtgagaaaagagcacagtccaagaggtaagcgagcaaaattcgaacagaaaaaacgcgaagtccaagtggtggctttccaattagaacgtgatattatacagaatatgtttgaaaaaggcggaatctcgagagagttagcccgagacttacgccaaaatttaaatatgatcgaaacgtacttatatgatgactttttagaataagaaaaagccctaagaacaacacaatgttcttggggctttctatttaagcttgtattttttttaattgttcagcgagactttctatttccaaatggaagttctttctgccatttttgtgaacaatggcggcatttctgagcttaattttttcttctttccctgtttctaagttaagaatattgatagtgtaatagggaagaaaagaaatggtccgaccgtgcaacagagtatcacattccagcatatattgactaaaaggatattttttatccgaaaatcctcttttgtaaaatagcgcgtgattattaatagagacagtaccattaacatacgtggagaagatgttaatagttgaaataacaaaaacggcatataaaagccaaaattgccaaacccgcaggacttcataagtaataaacaagtaaagaccaagacccaagatagctaaggcaacgatgaacgtaaaaaaagttttgatattcatattatatttgaagaaaggatagtttttcatatttgtgtaccacctaggatgttttagttaagattgatattgcttgagttgatcacgtaattcttccatttccacttgcatctgtgtatttgcgcctttgtatctacgagctgcattgtgtactttaattagtttctccgcgcgtgtatctttattgataataacaattcggtaataaggtattgctctcgcactaggactcttaaaacgaattaattttgcatcacattcgataatgtatttgctgtaaggatatgcttttgatttgtagtagaaagcttcctcactaacagccacttctccagggaaaaatttcttgaaattaaaaaaacaaacaatgactaatgctgaaagaatagcataaaattcccatgtcatagaaagtagagtagataggattactgacaaaataaaaaaagaactaaacataaccaaaagtgtaacactacctgcattgatattgaattttaaaaagcgatattttttcatgaatgcttgtccgcctatgttcattttataaccaaattttagcactaaaaacaaaggttgtctaacttagaaaaaatcaaaaaaactattgttcatgtgaaagctttgttgtataatgtagcttgctgtaagtaaactttatgtttaatattagtaaacttctatgacttgaggtttactatcactaaacttgaaagaaaggacatcgacatggaaattggcaaacgcattaaaaatcttaggctcagtaagaatttaacacaagaagaattaggcgaacgaacggatttgacgaagggatatatttctcaactagagcgagatttaagttctccctccattgaaacgttatttgctattttggaagtgttaggttccactccgaaagatttctttgatgaagaagaacacaatcaaaaagtaatttacggagaactagagcatactttctttgaagatgaagaaaaaggttacagaataaagtggcttgttccagaatcgaatgaaaaagaaatggagccggtactgcttgaaatagaggcaaatagctgttttaaaagctttgaaccatcactttcagaaacttttgcttatgtgttaaaaggggaagtgaccgtgctacttggtcgaaatgagtatgtagccaaaaaaggagaagcaatttatttccacgccgcagatgaacatcaaataattaatcgatcgagtgaacatgcaacactcatcttagtagcgacagagtcatatttataagggaggtaaatgattgtgacagaaacaattattcgttttgaaaacgtaacaaaacaatttgataatgatccaccagtgcttgacaatgtcagctttgaaatagaaaaagggaagttttatactttgcttggaccatctggttgcggaaaaacaaccattttgcgcttaattgctggatttttagaagcttcaaaaggacaaatttacctaggagataaagtaattaaccaaattccagccaacaaacgaccggtaaataccgttttccaagattatgctttatttccacatttaaatgtgtatgaaaatgtcgcttttggactgcgcattaaaaaattgaaaaaagaagcaattgacgaaaaagtaaaagaagctttgcgctttgttaacttaaaaggatacgaaaaaagagaaattagcgaaatgtctggcggacaaagacaacgtgtcgcaatcgcgcgagcaatcgtcaatgaaccagaagttattttgcttgatgagccactatcagcacttgatttaaaattacgtacagagatgcaatatgaattgcgcgatttacaaaaacgtcttgggattacgtttatttttgtgacgcatgatcaagaagaagcacttgcgatgagtgatgaaatttttgtgctaaacaaaggtgaaattcaacaaagtgggacaccgattgatatttacgatgagccaattaataaatttgttgctgattttatcggcgaatccaacattgttaatggcaaaatgattcaagacttcgaagtggaatttgtggaaagacgctttgaatgtgtcgaccaaggtttccgtccaaatgaagtcgtggaagtagttatccgtccagaagatttagagattacttctgctgaaaaaggtcagctgcaagtaaccgtggactggatgcttttccgtggtgtgcactatgaagtaggttgtatcgatatcgatggaaatgaatggcttgttcacacaactagaaaagttcgtgtgggtgataagattggcttagcgtttgaaccagaggcaattcatgttatgcgtctcggggaaacggaggaagaattcgataagcggcttgatagctacgatgaggtgcagtaatgaatagacgcacccgtacagtttatcttgttccttatgttctttggattttactttttgttgttgcaccgattttattgattgtgtattattcattttttgatgttgacggcaattttactgtagataattatattcattttttcacccccgtctatttaaaaatgacggcgagttcgttctggtatgcgtttttaattacggttttcacactgctgatttcctatccaacggcttacttattaacgaaactaaaacataaacaattgtggttgctacttattattttgccaacttggattaatttgctgcttaaagcgtatgcctttattgggatttttgggacatatggggcggcgaatcaatttttagaaatacttggaattggctcgaaacagattttatttacggattttagtttcttatttgtatcgacctatatttttattccgtttatgatattaccgatttttaatgcaattgaggaaattaatccgacgttgattcaagcgtcgcgcgatttaggcgcatctagtttaacgacatttagacgggtgattttcccactcactgctgatggcgtgaaatcagggtgtcaggctgtttttattccagcactatcactctttatgattacacgattaattgcaggaaaccgtgtcattacgctcggaacagcgattgaagaacatttcctagtaacgcaagactggggaatgggttcgacaattggcgtatttttaattattgcgatgattttaattatgttcctaacaggttcgaaaaagaaaagaggtgcgcgtaaatgaagaaaagtaaatggggtacgatttatttagtgcttgtttttgtgattttatatgcgccgattttctatttaattttttattcgtttaataaaggcggcacgatgcataattttagtggttttacgcttggctattataaagaagttttccaagatacacgcttactgattatcgtgctaaatacgtttgtgattgcgctactttcttctgtgattgcgactattattggagtttgcggggcgctggcgattaaatttatgccaaaaccatttgcgaaaaactcgcttttaagtttgaataatgtgttgattgttagtcctgacgttattatcggtgctagtttcttgattttctttacgattttaggcgtaaaattaggttttatttccgtcctagtatcgcatatcgcctttagtattccgattgtcgtattgatgattttgccgaaattacaagaaatgagcccgacgttaatggatgcggcgcgcgacttaggtgcaagccagtggcaagttctttcaaaagttattctgccgtatattatgccaggcgtgttagctggatttttcatggcgttgacatactcgctagatgattttgcggtcactttctttgtaaccggaaatggcttctcaactttagcggtagaaatctattcccgagcaagacaggggatttcgctttcaatcaatgctttgtcgacactgattttcctattcacgattattctcgtgatcggttattactttatcaaccaacgtaatacaagtaaaaatattcggacgggggcgacgaaagaatgaagcaactgctgaaaatttttgtaccagtcattgtcgtcgcgctcctaatgatgttacttgcaacaacgatgaaccgttcggagggctatgctgggagtaatacgctgacgatttataactggggcgattacattgatccatcactcattactaaatttgaaaaagaaacaggtatcaaagtcatttaccaaacatttgattctaatgaagcgatgatgacgaaaattgagcaaggtggaacgacctttgatattgcggtgccaagtgattatgcgattagcaaaatgaaagaagaaaatttgctgatcccacttgaccattccaaattaccaaatgaaaaataccttgatccgcgttttatggatttgtcgtttgatgatgataataaatattcgatgccttatttctggggaacgcttggcattatttataataaagaaatgttcccggataagaatttcgatacgtggaatgcgctatttgatcctgagttgaagaaccaaatcttgctgattgacggggctcgtgaggtgatgggacttgggctgaacagtctaggttactcgctgaacgatacgaataaagcccacttacaagctgccagagataaactagaaacgatgacgccgaatgttaaagcaattgttggcgatgagattaaacttctcatggcggacaatgaggcgggtgtcgcggttactttctccggagaagcggcggaaatgttaagtgaaaatgaagatttagaatacgtaattccaaaagacggctccaatttatggttcgacaacatggtcatcccaaaaacagcgaaaaatgtcgatggcgcgcataaatttattaacttcatgctaaaaccagaaaatgccgcaattaacgctgaatatgttggctatgcaacaccaaatgcaaaagctgtcgaattgttaccaaaagaaatttcgagtgatgaacgtttttatccggatatggacgaactgaataatttagaagtatatgataaccttggtaaacgaatgctgtcgtattataatgaattatttttggagtttaagatgtaccggaaataaagccaccagtatcttcacgcgagttcacaccaaagtcaaaacacgaacattaagcaaattacttgtggaatagatcagctatccgctaaaataatgttacgcaatttttttcgaaaaggagaaatggttatgactaaggagaaagtgttatggggttacgatgaaaagactgggccagaaatgtgggggcatatctgctctgactttgaaatcgcacatactggaaaggcacaatcgccggtagatattgaacaagctgacgttgtgaaattaaaaccatcaacaatgaaattctactataaagaaacagactatacgattagaagaattgaacaatcggtacatgtttttccgcatgacaaagaacaagggctacgctttaacggcgaatattatccacttgtatcattccatgcccatattccggctgagcatttgcttgacggttatatatatccgattgaatggcattttgttcatgaaaaaccagacggcacaacgcttgttatgagtgcttggatggatattgataatacaaataatatcgaatttaaaaatttaccaacctatttcccagaagtgtttgctgattttgaaacagaacgggaaattactttagatgtgaatgaatttatgccagaagagcgtgttttctatacgtaccaaggttcacggacgacaccaccaaccgtggaaggcgtaacttggatcgttttaaaaaatgcgaagacacttggccaagaagatttcactgaatttgaaaaagcaattggtaatacaagtcgaccagtgcaagatttaaatggtcgtgaaattactttttacaattaaaaaactagaaagcctcgctcgaatcttgtatagtatagacatagattctgagtggaggcttctttttatgtatgaaaaagcgagacagatgatgattgaagcgcatagtggccaagttcgcaaaattacaggcgagccttatttttcgcaccctctgaacgtagcgagaattttacgccgtgctggtttccgcgaagaagttgttgttgcgggattactgcacgatgccgttgaggatacggaaatgaccgatgccgatattcgcgcaacttttggcgatgaagtagccgatttagtagcgtctcatacagaaaataaaaccttatcctgggaagaacgaaaagcacacacaatcgaacaagtgcgcaccggaaatttagaagaaaaagcgttaatcgtggcggataagctagacaatttaacatccgtcaaatatgccttaagctcagaaggaaagtctgtctggagctattttaaacgcggctatgatctgcaaaaatggtacaaccaagggattaaaaataatatggaatacgggttaaatccatctgaaatccctccattttttgatgaatatgcgcgacttgtgaagtggatttttaagaagtaaaattttgtgtttaaatatctgttaaattaggtatttagaattaaattaataagtttttagaaaataagtttctttttccagaaatctattgtaaaatgaaagcgttataaaacttacgagaagggaagtttttttgaatggtttatggagcaattgaagcaggcggaactaagtttgttgtagcaatcggagaaaagtcagggaaaattattaagcgcgagagctacccgacaacggagccagcagaaacaatgaaagcagtcattcaattttttaaacagtatgaggatgaattaaaagcaattgggattggctcatttggaccgattgatattcggaaatcaagtgctacatacggttatatcacgcaaacaccaaaacttgcatggcgcaattatgatatcgttggtgcaatgaaaaaagaatttaatgtacctattggttttacgacggatgttaatgcagccgctttaggagaggtaagtttaggcgcggcagcaggtttggatagttgtatttatttaacgatcggaacaggaatcggtggtggagcagttgtttctggtaaaattctagaaggtttctctcacccagaaatgggacatattatggtgcgccgtcataagcgtgaccgtttcacaggaagttgcccgagtcatagcgactgtttagaggggcttgcagcaggtggcgcgattgaaaaacgttggggtcaaaaagcggcagaacttgcggataatgaagaagtgtggaatttagaagcgcattatatcgcgcaagctttaatgaattatacacttatcctatccccagaaagaattgtattaggtggaggcgtcatgaaacaacgccaacttttcccacttgtccgtcaaaaattgaaggcactcgtgaacaattacgtgcaattgccggatttagatgaatatatcgttcctccaaaactagaagatgatgctggaataactggctgtgtcttactagcagtggatgctgaagagtccaattaatggcgaaaaacagctctagtttatagggctgttttttgatatactaaattgtgataaaacaaacaagaacgcaggaggaaaaagatgtccattacgaacttattaaatattaaatatccgattatccaaggtgcgatggcacaaattgccaaagctccacttgtagccgctgtgtctaatgcgggcggtttaggaattatcgcttctggcggaatgactgccgacatgctacgcgaagaaatccaaaaaacaaaagcactgacagataaagcatttggcgtcaacttaatgctaatgatgaccaatattgccgaattaaccgaagtaattattgaagaaaaagtgggaatcgttacaaccggagcgggaacgccaaaaacgttcatgccaatttggaaagaagctggaattatcgtgattcccgttgtcccatccgtgatgattgctaagcgtatggaaaaaatgggcgcagatgcagttatcgcagaaggaacagaagcaggcggacacgtcggcgaaacaacaacaatggcacttttacctcaaatcgtggatgctgtaactattccagtcattggcgcaggaggaattgctgatggccgtggaatcgttgcagcgctagctctaggtgcaaaaggtgtccaaatcggtacacgcttcctagcaaccgatgaatgcccagtacacccagacttcaaagcagccgtgattaaagcttccgaccgcgacacaatggttaccggacgaaaagcaggcgcaccagtccgctcgattaaaaacaaaatgatcaaagaatacatccgtttagaagaagaaaacgccgatcgcgacacgttagaagagctaactttaggttctttacgaaaagcagtacaagaaggcgacacagacaacggctccgtcatggccggtcaaatcgctggcttaattacagaaatcaaaccttgtaaagatgttatcgaagagatgatgacagatgctaagaaagtgattgctgggttagaattaaaataatgtttcaaactgctttcttttgaagcgtttgagtaaaatagctttgataaattccttaatataatatttggatttttagtaagttataaaaagccgtgccagttcacttagtgctgatacagcttttttagttagtagaaaaattcatttctgtttcatcaatacatcctctatgttatactatgtaaagttatattattgcaaatgcaacaaaaggagattggcgatgaaagatatattaagagatataggtgtaattgcacgtgcacttgattcaataagtaatatcgaatttaaagaattaaatctagcaaaaggacaatttatttatctagttagaatttgcgagaaccaagggattattcaagaaaaactagtagatattttaaaaatcgatcgaaccactgcttcgagagctattaagaatttggagaaaaacggtttgattataaagaaacagaataagaataataaaaaaaataaactattattcccaacagagaaaggacagcaactatatcccttaattatccgcgagaatgaatactctaatgcagtagctttaaaaggatttactgaggctgaaattaatatgctcaccgatgcgctcaaaaaggtcaaagaaaatattgcagatgactggttatatgtcaaaaaaggcaataaaagaagttattaatttggaggaaatgtaatgataaaattatgtacaataagtgattcccaagcactcttagaagtaagttataagacatttgatgaaacatttagagcgcaaaataaaccggaaaacatggatgcatatttaaaaacaaattttacggctaaaaaattaagcgatgaactaaaaaacccacattcctatttttattttgtttttcaccaagaagctattgctggttatttaaaactaaatataggagatgctcaaacagaagaaatagctgggaatacaatcgaaatagagcgtatttatgtattgaagtcattccaaaaaaagggattaggtaaagagttatttaatcaagcaatagagatagcgaaagaagttgatgcaaaaaaaatatggttaggtgtttgggagaagaataagaacgctattcaattttatgcaaagctgggttttattaaaaatggacaacatgattttttcatgggtgatgattgtcaaactgatattattatgataaaagatttataaaaaaagttgagcgcatactaagctcaactttttttatcaaaattaagctgccaaaacaccccaaaacggtccgtcacctgcgcataggtcgaaccccagaacgccacttgcaactccatctccactttgcccgtagcactcaagacttcataggcgtacttaatatcatcctctgtttcaaaattgatcaagatcgtcacccgattgccaattgtaaaaccatcataaggcgcatcggtaatataaataaattcttccccattttttgctaaacgactatgcatcaatcgctcaccaaaaacggcatcgccatcaaaattgttcatctctttaaaacgctgaacgcttgtaatcttagcctgaaacacatctgcataaaatgttagcgcatcttgaccttctccgttaaaaactaagtaaggaactgcaaaagacatctcatcatctcctatacaattaatagctttagtataagcctaatctactgcgaagtcatgtctcaaaataataaggatttgtgaataaaaacaaaatgcttgcaaataaacgtgatatattatacaattacactaagaaatcggatatatttaaattaatatttttttgcaataaaataaagtaagtacttgcttttgggagtaggtgcgtaggaggtagatgtatgctttgggtaaaagagtcaattgagcaacttctcagcaaactacacacgaatttagacacagggttaacgaaagaacaagtgaaacaaaaacatgcagagttcgggacgaatgaatttgaagaggggaagaaagaatcacttcttcaaaaaattggtcaccatttagttgaaattacgacgattgtgttgctttttgcagcggcaatttccgcttatttagcaattacaaccggttatggttgggcgaaagtggttgttattttaggaattgtcgtgttgaatatggtgctcggcatttaccaggaaaacagcgccgagaaagcacttgctgcattacaaagtatgaatgcgcatttaacgacggtcattcgtgatggtgtgcggatgcaagtggacgcaacggaattagtaccaggggatattattgaaatcgttgcaggagatatgattccagcagatgcacggattatttctagtagcagtttgcaagtcgaggaatctgcgttaactggcgaaagtgttccagttgaaaaagacgcaaatgcggttgtttcagaaaaagcaccaattggcgaccgtctgaatatgctttactcaggctgtcttgtaacaaatggtcgtgcaacagcagttgtcgtagaaattggtatggaaacagagatggggaaaattgctggacttttaaatagcacctcgaaactgatgacgccactgcaactacgcttaaaagaattagctaaacgacttagtattgtagcacttttagcaggtattttaatttttataattgatgtatatgtgtacggtgaaacgattattgaaacgttgatgatcgcgatttctctagctgtagcagcagttcctgagacattgccggttatcgtaactttaacacttgcttatggggttcaaaatatggtgcggaaaaatacgattatccgccgaattcctgcagtagaaacgattggaaatacttcggttatttgttctgataaaacaggaacattaacgcaaaataaaatgattatccaacaaatttgggcagcagaccacacaccgataaaagcaacagctgaatttgatactgcagaacaaaaagtattagaaatgctgagtctttccagtaacgcgacgattgatgttacagacggcgaagaaaccatcatcggtgacccaaccgaaagcgcgattatccgtttactagaagaaaaaggaacaacgaaaaaagcattggaagccaaatatccacgcgtgttcgaacttccttttgactcagatagaaagctaatgacgacaattcaccaagtagaagacggatttctttccattacaaaaggtgcttttgaccgcattcccgtaaacttttccgaggcgtttttagcggaagcggagcgggtgcatgacagttttgcggaggatgcgcttagggtgttagttgttgcctataaaaaatatccggaaatgccgacagacttgtctagtgaggcgcttgagacggacttaacgttcgcggggatggttggaatgattgacccaccgagaccggaaagtaaagcggctgtgttagcggcgaaaaaagcgggtattaagactgtaatgattactggtgaccatattgtaacggcatcagcaattgcaaaagaaattggtattttaacggatggggacaaagcgattactggagcagagcttgctgaaatgtcagaagcagatctggagaaaaacattcgagattatgcggtatacgctcgggttagccctgaagacaagattcggattgtcaaagcttggcagaaaaatggtgaaattgtcacgatgacaggtgatggtgtaaatgatgcgccggctctaaaagcagcagatgttggagcagcaatggggattactggaacagatgtatctaaaaacgctgcagatatggttataaccgacgataattttgcaacgattgtagatgcagtcaaagaagggcgtacagcctatgagaatatccgcaaaacgatttactttttactaagtacaaacttttctcaaattttcattatgttaattgcgattattcttggctggggcgcgccggttgtagctgttcagttgctattaatcaacgttgtgtctgatgggattccaggcttcttcttaagtcgtgaaaaggcagatgactcgattatggagcgtaagccaattccaaaaaatgcagggatctttgcgaatggacttggcaagaaaatggcgacacaagcggttgtctttacgattgtgacacttgcaggattttatatcggacagtttgtaacgattaataattcgattggtgcaagctatgaagtagggatgacaatggcgtttgttattctagcatggtcatctgttgcacatattttcaacgtaagaagtgataagtcgattttcactatcggatttttatctaaccgtggcttgttctttagcgcgatttgttcgatgttgattattctaggacttgcgattattccaccacttgcgaacatgttcttcttagtagaaatgagcttaacgcactggattctcgcattcatcctctcgatgttcccactcctatttgtagaaattcaaaagcttattcagcgaaaaagagcaaaagcttgaaggagggcaactatatgaatgaaacagaaaaattggtagccgcattattagagcgtaactttggtaaaaatatcggtacacgctatccgggaaatgaagcggcgcaaatgcgggccgaggaagttatcggagaaattgctatcgttatcgcacctcttgttgaaaaacttggaatcgaaaataaaacggtgaaaaaaacgattccatttttatatgaacttcaaaaaaatcaattttgtgatatgagcgcctatccgtatccgcttcttctagtcaatggaacgagtacagatacagaaaaatattggcgggatctaccaacttactggacggacgatgcaaataaaatcgtgcttccgtatgttttggaacatattaaaaataataaagtacgtcaaaaactactagcttttcatgcttggcttttaggggaagtagtagaaatgaacgaggcgctaggggcagattttcgtgtgaaactagtctttgagtcagatatgcgtattcgtttacgggtgtatgaggtagaacagattgccatcgaagtgcattttttagacaatcatgataccgagcaacaacatttaggctatgatgtcagtttagatgcagattttaccgagaaagcaaggctcttattacgccaaggtattttgacagaaaatctaggattggaagcgctgaaagcttatatgaaatcggttttaccaatagcacacagcttgaaaaatttagaacatttaacgtttgaagagacaaaaaaactgaccaaattattaacgcaagaagaacctaaaattatggaagatacagatttaacaagtaaagcattagacttcttacaaaaagcagcacagcaataagaataaaatgctatttggaggaaagtaatcctaatagcattttatttttgcaagtggggcggaaagaatagtaaaatgagacaatgaaattagaaatgaggacgtaaaattgattcgacatgcgaaaaaatcagatgcaccaaaaatagcaccacttttactagtaatatggaaagatatggaattacctattttagaagtagagacggaagaagcaattacgaatgcgctaattgaagcgattcaaacagaagattatcgttatagttatagacatctgcatgtgtatgaaaaagaaggggatattgcgggagttctggcaggataccctgggaaaatcgaacctgaaatcgaccgcgcgtggaacgagattgcaaagaaacacggcatcagatacgaagaaccaatatttgccgataaagaaacatttcctggtgaatggtacttagattcgattgttacaaacgaaaaatatcgtggtcatggtgttggaacagcacttcttgcaaaattaacagaaattgctgcagaagatggtgaaaaagtagttggactaaattgtgacaaaggaaatccgcatgccaagcggctttatgaacgtctaggatttcatgtaactggagaaatcacacttagcggtcacgaatatgaacatatgcaaaaataagaaatgaggccaaccaatgaaaaaaattattttcacagtggtactaagtttggttctagttcttgctggatgtgccgatgtaacaaatacagtaaaagtggataaaaaaggggaagcgaccatttcctttgatatcgatatttcttctgtagcagggattttcgcctcaagttactcggatgaagtagaagctaaactgaaagaagctggatttacagtagataaaaaatcaaatacaagctatcatattgaaaagaaagtagataaaaatgaaacaacgaaaagcgatatgaaaccggaagattttggggtaaaaattaccaatagcaaaagtttcttcacacaaaaaatcaaagtagatgccgatattgacatcgaaaagatatggaaaaaagaagtggcggatgttccgtttccaaaagaaattttaagccaagttgattatacatttattttggatttaccgatttcgtcaattggagagaacaatgctaaaagtgtggatggcggtaagctcacttgggatgtgcctctcgacaaaaaatccgaaatgtattttgaagtcaccgtaccaaacgtaaaaaacattgcgattgttggtgggattctacttgtcgtaatcattggtctatttatttatcttattagaagacaccgaaaaaagaaaaaacaactataaaaaagtgtggatcagttagctaaactggtccacacttttatttacttcttgttctaactcttcgtagcaagctaattttttctcgatttttttaaacgctcggtctagttctgcttgccggcggtacatatcttgttgatgttctttcagtacagcgatacgttcggagacagtaccgtcaccacctttagttagttcaacaatttctttttgtttagcaaggggcattccggtgacgcgtaaacaggtgagtagttcaagccagtgaagggcatcattatcaaaaatccggttattatttttatcgcgtgctagaaaagggattaatccttctcgttcataatagcgaatcgtatgggcgcttaaacccgtgtgttcggaagcttctttgattgtttgttgcactaaaaccacctctttttttcttaataatagcaccttgaaaatcgaaaagccaaatgtttgcctttgagtatactctaaggtgtatagtaaacgtgttattacttttaggaggcggataaattgaacttaaaagatacagtgaaacttgcaaatggtgtagaaatgccccgtttaggatttggcgtatggaaagtgcaagacggcgatgaagcagtaaattctgttaaatgggcaatcgaagctggttacattagcattgatacagcagctgcttacaaaaatgaagaaggcgttggacaagcgattaaagagtctggaattaagagagaagacttattcgtaacaacgaaactttggaatgcggagcaaggttatgaatctactttggcagcgtttgatgaaagtttacgcaaattagaacttgattatgtagacttatatttaattcactggccagtcaaaggtaaattcaaagacacttggcgcgcttttgaaaaattatataaagacaaacgtgttcgcgcaatcggcgtatgtaacttccacgagcatcacttaaaagaattaatggaagacgcggaaattgctccaatggtaaaccaaattgaattacatccacaattaacacaagaaccattacgtaaattctgtgctgaaaacaacattgtagtagaagcttggtctccattaggtaacggcaaactgctttctaacccagaaatcaaagcgattgcagatgcgcatggtaaatctgttgcacaagttatcctacgttgggacttacaaatcggtgtcgtgacgattccaaaatcagtccaccaagaacgtattatccaaaatgctgatattttcgacttcgaattaaccgaagaagaggttgcaaaaatcagcggattaaataaagacgaaagaactggcccagatccagacaactttaatttctaatagtaaaaaatcccttccagcttatcgaactggaggggatttttatgctacaataaactaaaaaaagaggttaacagatggacgcaaaaacaataatagaaaaccgctttcaaagtcagaaattaatacaaactgcgtggagtggctctccggaaagaattgtttttcattttggagcaatgcaagcacaaaactacggtcaatcgctctgggctgttgggagtagaatgacgacgccaagtgaaaaggctgtagagcaagcgattaataatggtgaaattatccggacatggcttttgcgcggaacgattcacttgttttcagccaaagattatcactggatgatggatttaattgcgcctacgatagataaaatatgtaaaccttaccgagcgaaattagacctaacagaagaggtgcttcaaaaggctatagaagtcgtttcggaaattgtttcagaacaagccgttacgagaaaagacttggcggcccatttagcgacgaaagatttaccgagcgcagggattgcttttgctcagctgttagtttatttaagctcgcggaaagtcatttgttcaggcccggatgaaacttttagaaatacgacacacattccggctgatacgaatcatttcactcgagaagaagcactaaaagaacttgcaaaacgttacatccaaagccatgcacctgctactttaaaagatttttgtttttggtctggattaactgtgaccgatgccaaaatagggttagcggatatgcctaaaataggcgattattacataacaacattggttaaaaatggcacaatgctagctacaattccacttgctggttttgatgaatggattatcggctaccgagatcgctcagccgttttaccggaaatatggcacgatgaaattatgacgaaaaacgggattttcagaccggctattattacaaatggcgaagtagtcggaaaatgggaaaaaccaaagaaacgtgctgaattagaaggagacttctgggatcgttacatccagtttcgaaatatgctatagtcaagtagatgtataaattttaatttgaggtgataaagcaatgaatgcttttgataaattttataaaaaaacagtagaagaacgacatgcaattttggcggaatatgctgatttaaatgaagaagaacaagcatttttagcttctacaggggcgctttcttttgataaagcgaatcatatgattgaaaacacgattggtatttattcgctgccgctcggattaggaatgaatatgcttttaaatgataaacgttatgttgtacccatggcgatggaggagccttctgttgtggcggcacaaagcgctggggcaaaacttattgcacaaaatggcgggataactggaagtgcaacgaaacgaaaaatgattggtcagattgagttgatttctgtttctgatatccaagcagcaaaagaaaacatcattgcgaacgaagaacaactaattgctatcgctaaccaagctcatccatcgttacaaaagcgtggcggtggtgcggttaaaattcaagtcagaacagcacaaacagcgaatgacgaaacgttatttatcgttcatttactcgtagacacccaagaagcaatgggcgcgaatatggtcaatacgatggtcgaaaccctagcaccagaattagaaatgttgacgaacggaacagccaatatgcgcattttatctaatttagtagatgaagcgaccgcaactgctgtttgtcggattaatccagaaagcttggcaaccaaaacccagagcggtgaatgggttcgtgatagaattattgctgcatatgaatttgccgacgcggatatttaccgggcagcaacacataataaaggaataatgaatggcattgatgcggtaattatggcgtttgggaacgattggcgcgcggtagaagcagcaagtcacgcctacgcagccagaacaggaagctataaaccgatgtctaagtggtcaaaagatgcggacgggtatttggttggggagctaactttaccgatgccagtggcctttgtaggtggttctatagcgattcatccgattgcgagtctttctaaaaaaattgctcgagtagaatcagcgaaggaactagcgatgttagtttgtgccgttggattaacgcaaaatctcgctgctttaaaagcactcgtaacagaaggtattcaacgtggtcatatgtcactacaagcgaaatctcttgcaatgacagctggcgcagaagcagatgaaatcgaaatagtagccacatttttgcaagaaagcaaacaattaaacgtagtcgctgccaaagaatttatcgcgaaattgcgcagcgaaaaataaaataagttattaaatcagcctttacaaaaacttaacaatacattccgaacgtgataaaacctttaatatcaacaactttcagaggattgcttgtacttccctttacaaaataaaaaaaaggtatttacgttacttttactttcttttatgatgaaaaaagagtgaaattacaagattacagacaaaaaggagattttcatgggagacataaatattcagcagatgatttttcaatttatcggaggacttggaatttttcttttcggtataaaatatatgggagacggactgcaaatggcagctggcgacagactccgcgatattttagataagtacacaacgaatccttttatgggtgtacttgccgggattttagttaccgtattaattcaaagtagctcgggtacgactgttttgacggtcggattagtaagtgccggatttatgacgttaaaacaggcaattggtgttatcatgggggcgaacatcggaacaaccgttaccgcctttattattggtattaagctatccgagtattctttaccaataattgctgttggtgcagtacttttattcttctttaaaaatcataaagtgaaaaatattggccaagtattctttggatttggtgcgttattttatggactggatttgatggggcaagggatgaaacctcttgctggaatggaatctttccatgaattaactgcacaaatgagtacgaatccattcttaggtttgctaatcggaacaatcttcacggcggttgtacagtcatcgagtgcgactatcgggattttacaagaattatatgggcaaggtgcgattgatcttcaagcggccttaccggttctattcggtgacaatatcggaacaaccatcacagctgttcttgcagcgattggtgcgagtgttgccgcgaaacgtgcagcagcgacacatgttatctttaacttaatcggtgcaatcattttcatgctgatacttccgctattcacttctctggttgcctacctgcaaggaatgtttggactaaacccagaaatgacgattgcggttgcgcacgggacgtttaatattacgaatacctttattcaattctggtttataggtgcatttgcatggcttgttacgaagcttattcctggcgacgactcgcgaattgactataaaacaaaacatttagataccaatttaatcgatcaatctccgggtattgcactggaaatggctcgtgaggaaacgcttcgtatggcagattacgcgaaatttggtttgcaagaagcgagacaataccttgtgaaccgggactcaaagcatgcggaatccactgttcaagtagaagaagccgtaaataatttagaccgaaaaatcaccgagtacttaacgaaaatttcttctgtcgccttaacaaacaatgaaacagaagaacatgcgctaatgcttgataccgttcgtgatattgaacgcgttggtgatcacatggaaaacatcgtagaaaacatcgatcaactaattaaaaataaagcgaaaatgtcagaagaggcttccgagcaactcattgaaatgtttgagctgacaaccgcgaactttgaacgagcagtgaaatccatgcataaaaaagatcgcgcactcgcagaagaaactattttagtagaaaaagatattgataaagcagaacgcagactacgtaaaaatcatattcgccgcttaaacgaaggcaaatgccaagttgttagcggaattttatacattgatatcgtaagtgatttagagcgaattggtgaccatgcaaacaatattgctgaatctgttttagaattaaacgaataattataaaagaaactagactatttggcactgccactaaaaaatgagaataagataaaaacaccttcgttggattcatgtaaaatgaaactaacggaggtgtttctatgagtacaagagtaatgtatccagcagaaataaaagaaaaagctatcaaaatgaaattagcaggtaaatctaccaaagaaattatgagaacattaaacatcaaaaatccaacacaagtgaaaacttggtggcgctggtatcgaaatgaagaaacccacaggtttcaccaaggagtaggtaaacaatataaataccaaaaaggggtgcctgaattaccagaaatagaacaattaaaaatagctcttcggcaaaaagagctagaactggaaattttaaaaaagtacaaggcattggaaaggaagtgaatccagcatattttgttttgttagtagaagagctaaaaacaaagtatcttgtcaaagatatctgtcagatactacaagtacctttatctacctattatcgctggaaaaagaaagatttctcacagagctcattggagaaaaaaatagggcagttatgtaaagcatatcagttcacttatggttatcgaaaaatcgccgcattaatgaaacaagaagaacaagttggcatcaataaagtacagcgtattatgcaaaaatatcagtggcaatgtcaggtaaaagtaaaaaagaaaaatcgaccaggctccgcctactatcagacagaaaaccacttaaatcgaaactttcaagctagtcagccgctggaaaaattaactaccgatatcacctacctttatttcggagactgccgtttatatttatcaagcattatggatttgtataatggagaaatcgttgcctactccattggcgaaaaacaagacacagaattagtgctagatacattaaatcagttgtcccttccagaaggaagtttacttcatagcgatcaaggttcggtgtacacatcttatgaatattatcagtgctgtaaaaagaaaaacgttatccgcagtatgtcccgaaaagggacacccgcagacaacgctcccatagaatgtttccattcctcgctaaagtgcgaaacattctaccataaaacagcgtataaatacgctaaatctattgtaatccaaatcgtaaaagattacattaaatattataacgaaaaacgaattcaacaaaaattaggctaccaatctcctattaatttcaggaaacaagcagcctaatttaaagggtttttatttcattctcatttttccatgtcagtgcaatttgacgtctggtttctttttttgttaaaaatctacacttttactagtccttgtgaagcattgagtataagcgaatagtggtgtaaaataagaatgattataaaactagaatgactggaagtgttgagtcttatgcgaaatagaaaaacaatggatggaaacacggccgcagcttatatttcttatgcttttacagaagttgcagcaatctatccgattaccccttcctccaccatggctgaacttgtggacgaatggtcatcaaagaacaagaaaaatttatttaatgaacctgtaaaagtagtagaaatgcagtccgaagcaggagcagcaggaacagttcacggatcacttcaagctggcgcgctaactagcacatacacagcaagccaaggtttacttttaatgattcctaatatgtacaaaattgccggcgaactattaccaactgttttccatgtttccgcaagaacgatttcggcggcatcgctgaatatttttggtgatcatagtgacgtgatggcagcgcgccaaactggatttgcgatgctagcagaaggttccgttcaagaagtaatggacttatctgcaattgctcatctggcttcactaaaaggaagtttgccatttttaaatttctttgacggctttcggacgagccacgaattgcaaaaaatcgaagtacttgaatatgacgaattagaaaatttgctcgacaaagaggcattacaacaatttagaaatcgcgcaatgacgccaaacaatcctaaaacattaggttcgaatcaaaatccagatatctttttccaacaaagagaaacggtgaaccgttattacgaggaaattcctagtatcgttcaaaattatatgcaagaaattaatcagcttcgtggcacagattatgacttagtaaattattatggagcagaagacgcaacagatgtcattgtggcgatgggctccgtaacaccagtcatcgagcaagtcattgattacttaacaacccaagggaaaaaagtcggtttgctaaatattcgcttatatcgtcctttcccagcagaaaactttttaacaaaactgccgaaaacagtagaacgcgtggctgttttagaccggacgaaagaacccggatcaggcggggaaccacttttactcgacgtgcaaagtgtgctttatgatagtgagactcgtccactagttattggcggtagatatggcttaggttcaaaagatgttacaccagaccagattctcggtgtttattcgcacctaatgaccgaaaaaccaaaaccgcgctttacgattgggattacagatgatattacgaacctatctatcgaaaatgatggaccgagtgacctcacttctgaaaaaactttccaatgcaaattctggggttttggctcggatggtactgttggcgcaaataaagccgcaatcaaaattattggcgataataccgatttatacgcacagggttacttttcctatgattcgaaaaaatcgggcgggctaactgtttcgcatttgcgctttggtgaaaaacgaattcgctcagcctatctaatccaacaagcggattttgtctcatgctccacctcggcctatttacgttcctatgatttattaaaaggtttaaaaccaggcggaacattcttgctcaataccatttgggaaggcgaacagttagaacgccatttgccagctgccatgcgcgaatatattgcgaaaaataatattcaattttatacattaaatgcgatgagaattgcaggagaagcgggacttggtagaagaattaataccgttatgcaaacggcctttttccgagtgaccgacattttaccgttcgaaaaagcacttgctgatttaaaagcatcggctatcgctacttacgggaaaaaagatatggcagttgcggagaaaaatattctcgcgatggaccaaacagttgctaatttgcataaagtagaagttcctgcaagctgggcaaatccagttgtaacagcagaaacgaatgcaacgactgaaaaaccagcttatgtacaaaatatccttgagccagtgaatcgcttagaaggcgacaacttgactgttggtgatttaatttcgaatggtatggtcagtggggcttatcctccggggactgcagcttacgaaaaacgcggaattgcactcgaagttcctgaatggatttctgaaaactgtacgatgtgcaatgaatgcgcctttgtttgtccgcatgctgccattcgtccgattttaacagatgaagaagaaatggaatctgctccagaaggctttatgacaagagaaatgcgcggcaaagatggccttcgttaccgtatccaagtttccccaatggactgcactggttgtaacttatgtgcggaaacgtgtccggcgaaagataaagcgcttgtaatgaaaccatttgaagaagtggcagctaaagaaaatccgaattggtcatttgcgattaatgtgaaaccgaagaaaaaccctgggaagaaaaatactgtaccaggaagccaatttgaacaaccgttattggagttctctggtgcttgtgcaggttgcggtgaaactccttatgttaaattattaacgcaaatgtttggcgaccggatgatgattgctaatgcaactggttgttcctctatttggggcgcatctgcacctgcaacgccttatactgtcaatgataaaggacatggaccggcgtggggcaattcccttttagaagataacgcagaatatggttatggtatgtatttagcaaaccaaaccatgcgaaaagctttaaataataaagtgacaaaagcactcagagaagaagccatgtcagaaacgttacgcgaggcgcttgttgattggcaactgcaaatggacgtttcagaagatacgcgcgaacgtgcagaagcattacaacttgcacttcttagtgagatggaagatagcgcggcactcgaatctatttataatgaccgagaattatttattaaacgatcgcagtggatgcttggaggcgacggctgggcatatgatattggcttcggcggaattgatcatgtgttagcatcaggcgaagatgtaaatattttcgtaatggataatgaagtatattcaaatactggtggacaatcatcgaaagccacaccaacagcagctatcgccaaatttgcttcaggtgggaaatcggtcggcaaaaaagatcttggcattatggcgatgagctatggaaatatttatgtagcccaaattgcgatgggagcgaataagcgccaaaccttaaaagcaattgaagaagcggaagcatatccagggccatctttaattattgcttatacgccatgtattaatcacggaatttcaagcggtatgaaaacgatgcttagtgaaacgcaaaaagcagtggaatgcggctattggagtttgtatcgttacaatccagcactggaagaaaaaggaaaaaatccaatgacgatggactacaaaaaagtcgatttcgatcaattcgaagacttcctaaaacgcgaaacaagatactcggcgctctataaagcaaatccagaagttgccacaaaactatctgagaaaacccgcttggatgcagaaaaacgctttaaacgctacgcaacaatggccgggcttgatttagagaaaatatggaagaaaaaagaagcaattgaagatgtgaaagcgcccgttgatgatgagcgagcagcaaggaaagcagcacgtgaagcaagaagattagcgcgggagcaaggtaaataaaaaaagtaggcctagcattagctaggcctacttttttgcttttgatctgtgggaatcagaagcgatgtgggaatgaatagatattctcttatgagagttataaagaaataactactatttaaatataactttttttcttagaagatgcactagaaaaatgaagagataagttttcatataagtgttagttgttgcagcccaacctatttggtacttgtgaaagttttatgacaattaaaaacctagtagttaacggttttcatgaagcaaaccattacgataagcatctagtagcaattttaaatcttctgcctgttcactaagtttagccccaatatcggtatcccttacacgtttacggttaatttccatttcgataacttgacgcgtggaaagaatatccgtttcatttttgatagcatcctcttttgtagtaaatggctgatgactaactagttgtaaaccgtaactgttgaaaagtagtgtataacccgctaagtttgtctctttatgatatgcttttgcgaacccgccatcgatgacgagcattttaccactcgctttaatcggactttcaccttttccttctttgactggcgtatggccgttaatgatatgcccgcattctccgtcaagctcaaattcttctaaaatttgtttgcaaattaattcgttattacgcaatttataataaggatttttttcctctgtgtgggtttctttttctgcaacaaaataacgttcaaacgtagtcatttcactttttccgaatagcgaagaaatggcaccagtccacaaataccaaacgatatcacacgcatatttcttttcttttgttccagttgggcggacgtatgcttcgcgggtaagtatttcaaactgctctaaaagcgcacgaccagcatatttttcgccacgtaatttcatttccataaaagtcccatctttgtggagcggaatgcagccatggtagagtaaattgccattataagttaaaaacatgctgccttttgaatatagaaattgtacatgtttttgcaatcggcggcagtttttaaaagcggcagtaattttcccaataagttctctctccgcatcagtaagttcataaggattttctggattaatcgttggaaaatgattgtctaacaactggtattcttttccttttagttgaattgtgccttttttgtaatcgataaattgaagtaaaagccgatgattcatatcaaattctttgcgtcgtttaataatttcaccttccaatttaaactgaataatcgagatagccttgtgcatcctagcaatttgcgtgatttcagcattactatagttgatattttcttcattctttggctggaagtaggtacaaggatcgtctttgtacacttcgtcggcaaaaagggctagggggcgaagggaaataccgtaactatcttctaaaatatctaaatttaaatagcgagcagaaatccgaataacattagccgcacaaaccctagagccactagccgcgcccatccataaaatatcgtgattaccccactggaaatcgagcgaatggtaattcattaatgtatccatgattttatctggataagggccacgatcataaacatcaccaacaatgtgcaaatgatccacgaccaattgttgaataagtagtgagagagcgctaataaattcttctgcacgaccaagtgaaataatatgttgtaaaatttcttcataataaagctttttatcgtcttcattgtagttttcatgaagtaactcttctaatatgtaggcaaaatcttctggcatggcttttctaactttagaacgtgtgtattttgaagcaacatactggcagagttcaatcaaacgaaaaagtgtggtgcgataccaagcatgcaaatcttctgtttcactagcaatcaaatccatcttttcttctggataataaatcagtgtactaagtgaattaatctctgcatcatctagctctgcgccaaaaatatcacgaattttccgttttacaacaccagaaccattacgaagcacttgttcaaaagcactatattcaccgtgaacatcacttaaaaaatgttccgttccttttggaaggttcataattgcttcgaggttaatgatttccgtagctgtcttggcgatagtaggatattcttttgctaacaagcgtaaatatttcatatcaatagttttcaccagttcattgcctcctttttaattggtatagctattatatttcttaaatgtaagcaaggcaaacgttttgtttcacaattggtctatacaaaaaagacgagctagagcccgccttagaaaactggatgaagaaaatagagcacaatgggtaaggtaataatacttaaaacagtactaataaacgtggcactagaaactaaatctggttttgtatcaaattgtacagccattaaagtagtattcgctgcagttggcatagctgcaagcaaaatcataatttgtttcgtcatttcgtcaacaggaagaatcaacgttaaaccaaacgcaatgattggagcaatgagtaatttgagtactaatgcaatgcctactttcgtaagttcgattcgtctaaacgaaataaccgctagctgcattccaaggacaatcataatcgttggaatagctgcgtcgccaacaagctttacgcaagtcattaaagcggaaggaagtgaaacatgaagtaattgaagcgcaagcccgagtaaagccccgtaagcaatcggcatccgaacaactcgtttcatgaccgttttcattccatttgcatctttactcccttttgcagcaaaataaatcccaatagtactcatagccagttgctgtaagaccattaatactacagcaatatcaagcccaaccgccccgaaaacaagcaagacaacaggcgttccataatttccgttattcataaacgcactagccaaaatgagcgcgcaacgatcttgcaagttataacctagcaaaaaactaatcaaactgacaagcaaaattaaactcagacaaagcgcaaaaatgtaaatcgccaaatatgcataatctatcgtaagcggattggtataaaaagtattaaatgcaagaaacggtgacattaagtaaagcgtgagtttagataagttaggaatatcaaattttaaagtcttttgcccaacaaacccaatagcaaaaatcccaaaaactggaagtaaaataagtagaaattccatggcggccctcttttctatgtatattgtagcttattgtaccataaaatgaagtttcagtaagacaattatacatgcttctattatagtatttattttaatctaacagttatcttaattagcttaaattcaagcaggagctaattttagatgggggagtaaaaaacgataaaatgaagttagagatgatatatgtatacgaacactaattggttctaatatttgaaggggcaatgttttgtcacaaaatagccacttttaggaaaaatacacagtttaaaagtgttttttggagtatcaaatacgacatgttgtcttatataatttaaatagcgaattggaaatatagagatatcggcaagaaaaacctctattttagcttctatatttacaaaaaaacagagggggactgagatggaaaaaatacaataaattgtaggtgaatttgcccagataataaaaagaaatattactatttaaaattatgtaaactgaaaaagaaagagttactaagttgtatgggaatcgcgggatgttttaaaattaatttgtaacttgaaaatggcgaaatagtttatttgctgggaactaaaatcagcattgaactttgaactcaaacagtatataacagttatctgagacattactaaactttgaaaaacgcacaggaaaggaactgttcatgcctaaaaaattatataatgaaaaattcaaaaaaagtctagtttatttatatcataaaggaacatcgaagcatacactatgtaatgattttggtgtctcaatagcatctcttacaagatggatcaaattttataacacagaaaatatagatttaaatgaagctaccaatattttacaaatgtatgaattaaaaaaacaaaaaaaggtactagaggcagaaatttctgctttatcagaagctatctcgatttttaacatggagacgagcattgccgaaaattaagtaaaatccactcatatattattatgggtggatttttttatgagggaattaccgtaagtgacatttttgtaagtttcatttttagagtaaaagcgttaaactactaaagcgaatattggggattgcatgagtaatattctacatacaagataaccttattttctgaaattgaaatataggagacgatttaaatggttgcgtatggtgagttaattcgcgaagtacggctttcaaaaggactaacgcaaaaagaagtttatacaggagtaatttcaaaatcatatgcaataggttttgaaaaaggaaaacatgatattacattagtactatttgaagaaattttagaacgggtcatgttaagttcagatgaatttttctttatgaataggggctattctttagcggaggaagataatttttggtacaaatttgcaaatgcagctaatcaaaaaagtttggcagaattacaagaattataccaagaagtattgcagcaaaatggcgatagagcgaatctaaggaaagcaattgtccactcgagaattgaaattaatgaacaatttcttttgaataatcgatttgacgttagtatcgtttctgaggaagataaagcagttatccaaacgtatttgtggaaagttcaatcatggacactagaagaaattcggattttcgctaattcagtggactattttgaagaagatgtacaaatttatttttttcaattggtcttgaagtcactcgaaaaatataagcattacgatcgtggtaaaaaagtattttccacgctactcaccaacataatagaagaactaatcacccgtgatcaattagaatatgccgcgcaattattagaaatactgcacgaactttcttctacgcatgactgtgctttttaccggattatgcataattactatcaaggcttaatatggatgaaaaatgacgaggtcgaacaaggcttaaaagagtctaaaagtgcaatccgaattttagatgcacttgattacaaatccctcgcgctactttataatacattacttcaacagtttttagaaaaagagaatatacaaatagtttaaagtaaatcagataccttttataaggtatctgtttttttggtcttatatataggacctaatgagttttattgctcatatgttgtattatttggaatgtactaattttcacatgttttttggaaaggagagatttttatattaaatcaaaaatatcaattactacttcataatgaatatgacacaaaaagtggtgatttagtcaaaaaagaaatagttgcaactaaaaaaactaaaaatctcttggaagatctaacttcgcatttgttatgtgttacaaatcaaatagagtatggaaaatttatcacttggtatgaaatggaaattaaaaaagttctacaagttcatcccaatcagcactttattattaaaatttcctttcaacaattatattttcgggaaacaatgctgttgcttgagaatttacagaaagatagccggcgactaacgattgagctagttggagatagtcagattagcccttattcaaaggaacatttttccgcagaggacagtgatgcttttttgaaagggaagttaaaaatgttgaaaaagtggcattattttatttcaaagcatattgaaagtggtgccatcgaacaaacactgatttttacgccctatattgatgaattgaaatatagtttaacgcaaaagtcgaagctcttacacaatattactgaattaaagttttttctatcattttggaaaaattgggctgagcttcgatttgttgattttttagttttagtagatgaaaaaaacgaatttgtatcgcatgtgcttttaccagatgaattaaatgtacgttgcaaaatgtatgagaactttggaggaatggtcagtgagtaaaaatgtaaaaaaaatagtgataactctctttgcattaataatgacagtaggattagcaagtgggttcatcgcacctataaaagcaagtgcagatacaaataatttcacggttaaagtggaatatgttgatgcagatggagcggagattgctccttcagatatattaaccgattatcattatgtatctactccaaaagatattcctggctataaattaagagaaatacctcataatgcgacaggaaatatcacagatactggaattatcgtgcgttacatatatgataaaacaatcgatgtaagatacgtagatgaaacaggcaaagacttattaccagtagtagaaatcatcaatagtgaagcagcggttttagagacaatatctgactatacatttgtaaaaaaagacattagcatagatggcttgcatatcatttttcgctataaaaagaatatttctaccattccagatttcggaaaaccgaatcaagtcactgtaaattatctggatgaaaacaagactccaattgccccgtcattatatttgagcggacttttcaacgaagcatacaacgttccgatgaaaaaaattaaaggttatactttattaaaatacgattcggaaattcttggcgtttttaccgaatcaccacaaacaatcaacatcatttatcaaaaaaaagcgcctgagcaagcaccaagcatggaaccattacctgatccaactgttccagaaagcccgcaagtagaaaaatcaaaaataaagaaatcaaaaatagagacaacagaaaaaagaactacatcaaaagtgaaaatcgcaccgaaagcattaaaattaaccaaagtcgaacaaaaaaaacaagagacgaaagatagcttaccaaaaacaggtgatagctcggtaaacttattaattacatgcctcggaattattgccatatcgtgtggcgtatacttactcgtacaacaaagccagaagcgccgtcgtaaagaatagaaaataaaaacaagcaatcctattttcggattgcttgtttttttatccttctcgtttaagcatctttgtattagctaaaaatagtgcagcgacgagtaaaagaatcgcgcctgaaagtattagtgtggaagttgcgctagagtggtcgacaataataaatcgaataatcgctgtgataccaatataaatgaagtagcgtagcggaaaatgaaaatgagattcgaaatattttacaatgagcgcaataaattcaaagtaaaggaaaaacgtcaaaatatcttgtgtcatataatagtaagaaacgtccgtgtctaagaagaaaatattattgaaaatcgtaaatgcctctctaattaaaaaagcaacaagggtaaagccgaccataataagcgccagattcagggtaattcgtagcaggatgggaacaatagaagaaattttttctaatcgtttcatcagttgcctcctttccaaaaacgatatcgcttttttagtcattttacactataatgggaaccatgactatttttaaggggggattgttattctaaaacgattttttagttattataaaccgtatcgaacactttttatcattgattttggttgcgccgtcttagctgctattttggagctggcttttccagtcgctgtaaaccacgtgattgatacactacttccaggaaaagattttggtcttattattactgctgctttggccttattattcttttacatacttaatacatttatgcagtacattgtcacttattttggccatatgcttggtcttaacatagaaacggatatgcgcagagatttattcagccatttgcaaaaacaaccatttggattttacgataatcagaaaactgggaaattgatgtcgcgaatgacgactgatttatttgaaattggtgaagtagcgcatcatggtccggaagatatttttatttcgattatgtcacttttcggtgcatttttcttaatgttaaatatcaatgtaaaattagcgatttcgacgtttatcttagtgccgattttgactgtattaattgtctacttcaacaagcgaatgacgaaagtaacaaccggaatttttaaagatttaggtaattttaatgccggcgtggaaaatgcaatcagcggagtgcgcgttgtgcaagcattcgccaacgagccacatgaaaagggacgctttaaagtgctcaaccaagcttatcgtaaatcgaagttgatgttttataaagtgatggggcttagtttttcgtttaactatttcttgatgcgcttaattagtttatttgcacttttattcggtgcttattttacgattaatggcgaaatatcctacggggagtttgtcggatttatcttgctaacaaacgtgttcatccggccaatcgagaaaataaacaacgtaatcgaaagctatccaaaaggctttgcaggatttaaacgatttctagaagtgatggatacagaaccagcaatccaagacgaaaaagatgcgaaaccagccgaggcgttccgtggtgacattgcttacaaccaagtatcttttgaatatagcgatggaaaaaatgttctaaatcatataaatctttctattaaagccggtgagactgttgcgtttgttgggccaagtggggctgggaaaacgacaatttgtaatttgttgccacgtttttacgatgtgtcagctggtgagattacgattgatggtgaaaatattaaacgattcactttaccgtccttgcgagcacaaatcggcgtcgtgcagcaagatgttttcttgttttctggtacagttcgtgaaaatatcgcgtacggaaaattagacgctagcgatgaagaaatagagcatgtcgtgaaacttgcccatctttccaaagtagtagaagaaatgccagatggcctcgatacaatcattggcgagcgcggtgtcaaactttctggcgggcaaaaacaacggttagcaattgcgcgaatgtttttgaagaatccgcctattttaattttggatgaagcaacgtcggcacttgatacagaaacggagcaagtgattcaagcctcgttagaagagttagcggaaggaagaacgactttaattatcgcgcacagactcgcaacgattaaacatgccgatcgaattatcgttgtaaatgaaacaggcatcgcagaaacgggaacgcatgatgagcttttagcgcaagataatggtgcctataagcgattatatgatgcccagtttaatacaatttaatgaataaaaactttcggattttaggaaatatttgactaaaaggaaagcaggaattatttgggaagcccaagataattcctgcttttttgttttctgcatgataacaagtgttaatgacggaaagagagtatctggtttatatttttatcagcgcaaaaaggggaaatgatgcatttggacagcagaggtgattgctttagaaaaattggtagactttatatggaagcgtttgcgtaacaatactcatcgtattctaaatttggaatgaagattacacttgaaaggaaaattataatgtcattattcagtttgaaaaaaaagaaccattttgttccactagaaattcaaagacaacaatggttcaaacactttatcgttgcatttatgtctgtatttatttgttatctaacggtctatcttctaaggaataactttaaagcagctcagacattgttaattgagcagaaccatttcagcaccacagaactaggaatgattggtttagctttttcggttatgtacggaattggaaaaacgattttaggatatgtcgtggatggaagaaatgctaaaaaaataatgagttttttattagggatttccgccattatatcaattattattggaatacttttagttgcaaagcaagcaacagtgggtatattgtttatcctttggggagcaaatggatttgtgcaatcaccaggtggaccggcttcctattcaactatcacacggtggacgccaaaattgaaaagaggaagatggttaggtttttggaatgcctcgcataatataggtggtgctttagcgggaattgttgctttttggggtgcgactactttctttaatggcggcgcagggggaatgtttatcgttccaggtatcattgcaatcatcattgcaattatttgcttctcggtggggcatgatgaaccagaagaattaggctggaactctgccgctgaaatttttgaagagcgggaagaacaaggagaatcggagacaaaagacctttctagatttcaaattttgtgtcgatttgttattaataatccttgggtatggactttatgtgtcataaatatattcatctatattgttagaattggtattgataattgggcgcccgtttattgtattcaagcgctaggatggagcacaaaagatgctattatgactatttctttttttgaaattggagcattgctaggttcattatcgtggggctggctctcagatattatgaaaggtcgccgtatgctttgctcgattattgcagttgttattgaatttttcatgttaattagctattcgcaagttacaagtgtttatagcatgtatacggtattatttattttaggattcttagtatttggcccccaacttttaattggagtgtcggtgatagagtttgttcctagaaatgctttagctgtaacaaatggcttaactggaacgtttgcgtacttattcggagattcttttgctaaagtctttctaggatatattgcagacccaacaaaagcgggtatgcaaatatttggctataatttacatggctggggcgcaacttttactattatgtttacagctttaattattgcaggcttaatgatgattccagttgcattaaaacaagagaaaattatacgacaagcaaaagttttacatctataagttgaaaacaatgagtgaagataaactaattactaaaaaggtatccttattaatagtataaggatacctttttcatcgcaaaatggtttcttaaatacgaaaaacattattttgctaaagaagtctttttgtaaaggataaaaattgcaacagttattaaaaggacacccataatagcaggagcggcatggccaagggtaatataaatttgcccaccgataataggtccgataatacgcgccaaagactgaatggcttgactaccaccttgaatccgaccttgttcactagcgctggcagcttttgaaaccattccgttgaaagagggcccgaaaatcgagtcaccgaatccaaacacgaacataccaataacgagtaatggagcaagtgtgaaaatcgaggaagttgcaataagcgaatatccgataatctccgcaatcattccaagaacagcaatttgtttatccgttaatctgattaaaagtttgggcattacgaaagcttgtgacaggatatcttgaatgcccataattgagaacatcattccgattaaagccggcttccaactgaaactatcgatggcaaattgagacatgacagcttgcaacgaaccatttggaacccaaatgaaaaatgccgcaatcagtaaacgccctaagtttttgatggtcagaatgttaagcagctgggaaaacggattgagtcgcattagcggaattcgttttaaacgatttgcgtcgtctaaactctcaggcatataaaaataaccgaataagaagttaatgaaagtaatcgtcgcgccaaagaaaaatggcatagcataaccaaagtgggcaagcaaaccaccgaaagctggaccaagcgcagcgcccgcacctgcagcagcacttacccagccaaaatatttcgtccgctcctcttgaggtgtaatatcagcgaagaaagcaaacagcgtactaatactcccaccagtaattccttcgataattcgaccaagaaagagtacccaaagcgccccaccaagaccaaaaataaagtaaccaatggcagagccaataaagcaaattagtaaaaccgggcgtctgccaaaacgatcacttaaagcaccaagtccaggcgcagcaaagaatacgcaaaatgcgtaaaccgatgtgagcagtgtcaccataagcgcttgatcactagcatttgttacataaggtgtcacgagaaaagggacaacgggcataataatactaaaacccattccacagaggaaaacagatataagaccgaaaagtaaagttttcttattagttaaagaagttctagatttagattgaaacatgtaattctcctatcaattgtttaattagtgtcctaggaaacataaatagcttaactcctttttgtttccttgtcaacaaaaataaaacaataaaaaacagcctaactcaaaatatataggctgctagagggtttattcagattttgtttttaaaactttcttcatctcattatccaaatgacgactatatttatccacaaattttaacacctcggcatattgctcatccgatatgtcttcgaaaacaactttatcgcgatccagaaattcttgatgcaattcatcgtgtacttggtttatttcagcccctttagttgttaaacggaaatagatttctttcttgttttctggtttttgataactttcaatatagcctttatccattaattttttagtgattttactaatcgcgctttttgtcatatagaaagcttctgcgagttttgttacgttagggtcttcatttttggcaatatattcgatacagtggacttcggaaggtttgtatccctcgagcgctttttccatctttactttgttaatccatgcgagcttattaaataaatctctaacgtttgccatgacttgttcgtttttatccatgtcatgccctcctaatctatctatctggttgtagtatagccgttttttgtgtccttttcaactattttttgcccttaccaaccaaaagagagacttgaaagcgctgtttgttaagagtgtgtaaatttccagtgttatcaatattatttcactgttaagatttgttatacttaacacataaactgtttggaaggggctgacatgattggagatataccgcaaaagcgcggcagaaacatttacacaactagaagcgacagaaaaaggcttaacaactagtgaggtaacaaaacgacaagaaaaatacggttttaacgaactgaagaataaaaagaaagatccactttggaaacttttccttgaaacatttaaagatccgatggttattgttttagtcatcgctgccttggtgcagttggttttaggcgaagtagtcgaatcgcttattatctttttagtgctgattgtgaactcgataattagcgtagttcaaacgcgaaaagcagaaagttcgcttgatgcgttacgagaaatgtctgcgccagttgccaaagttattcgtgatggttctaagcaaagtattcatgcgcgcgaacttgttccgggtgacgtcgttattttggatgcaggtgatttcgtcccagcagacggccgtttgttcgaaagtggctccttgaaaatcgacgaagggatgcttactggagaatcggaggcagtcgagaaatatatcgataccattccagatgaagtaggacttggcgaccgtgtgaatatggttttcagcgggtccctcgttgtatatggtcgcgggatgtttgttgtaacaggcacagcgagcgaaacggaaatcggtaaaattgccggattacttgaaacggcagaagcaaaacaaacaccactacaaagaaaactagaatcattcagtaaaaagctaggactcggtattttagcactctgtgtacttatttttgctgtcgaagctggtcgcgtattactcggcgacaattcagcggatatggcaacagcgattttaaatgcctttatgtttgccgtggccgtagctgtagcagccattccagaagcactttcttctattgtaacgattgtacttgcggtcggaacaaacaaaatggcaaagcagcacgcgattattagaaagctcccagctgttgaaacactaggctccaccagcgttatttgtacagacaaaaccggaacattaacacaaaataaaatgactgtagtcgattattatttacccgatggaacaaaagaaaatttcccagaaagtccagaaaattggtcagaaggggaacgtcgtttgattcatattgcggtactttgtaacgattcaaatattaacagtgagggcaaggagttaggcgacccgaccgaagtggcgctaattgcctttagtaataaaaataatcaagattacaatgaaattcgagaaaaattcatccgtgaaggcgaaattccctttgattcagatcgtaagttaatgtctacgcttcatacctttaatgaaaacaaggcaatgctaacaaaaggtggaccagacgtgatgttcgcgcgttgcagttatgttttccttgatggggaagaaaagccaatgacagaagaaattttagcgaaactaaaagaaacaaacgaagaattttcgaatcaagccttacgtgtcctcgcatacggctacaaacggatgcctgctgatacaaccgaattaaaattagaagatgagcaagatatcgttctagttggtttaacagcaatgattgacccaccacgtgaagccgtgtatgcatccattgaagagtccaaaaaagcgggtattcgcacggttatgattactggtgaccataaaacaacggcacaagcaatcggccgggacattggtttaatggatgctgatgatatcgcattaacaggtcaagaactagacgcaatgccagaagaagaactcgacaaaaaactagaacatatcgcagtctacgcccgagtttcaccagaaaacaaaatccgtatcgtcaaagcttggcagaaaaaaggcaaaatcaccgcaatgactggtgatggtgtcaatgatgcgccagctctaaaacaagccgatattggtgtcgcaatgggtagcggaacagacgttgcgaaagactccgctgcaatgattctaacagatgataatttcgtttcgattgtggatgcagttggcgtaggtagaaccgtttttgacaatattaagaaatcaattgcttatctatttgcaggaaacctaggtgcgattattgcgattttattcgcgctagtgctggactggatcaacccgttcactgcattacaattactatttatcaacttagtcaatgactccttaccagcaatcgcactaggtatggaaaaagcagaacctgacgtaatgaaacgcaaaccaagagatataaacgaaggtatttttgctggtggaacaatgcgcgccgttatcagtcgtggtgtattaatcggtatcgccgttatcatctcacaatacattggtatgcaaatttcaccagagatgagtgttgcaatggcatttactacgcttatcctagcacgcacattacaaacatttgcagctcgttcgaatgtccaaaccgcatttggcgcaggattcttcagcaacaaatacgtaatcggtgcagtattgctttgtttcgtcctatacggaattactgtactaccaggagctcgcgaaatcttctcaatcccagcatcatttggcctacatgaatggtcgattgcagccgggctagcacttgcagcagttgtaatgatggagattattaaagtagttcagaataagtttttcaaataaattataaaaacacagaaattccttgtttggctgaggatttctgtgttttttatttcatataaaatacaggtttcttaaattataagtaaccattgaaccgatatataagcaatgagttattcttttggaaaaagtactaaaaaagtaaaaaatccgatacgacgatgtggatctttgataaatcgatttaaaagcattgaaaatatctctatttataggggattttagtttttcttaaactttactaaagttttttcatttgttaaatgtgtctgaaatatgtcggaaagcgtttttttgtatgacgaacttttgtataaaaaagttatatttgttatttattttaaaaactcattttagtcatatgtacatagaagttctttacaagtaatataaaagttgcaatgtgattacacgttatttcacagcatataaaatatatttgaaggagagaactcttttatgattaaagcaactagagcgcgacattatttaatgctgttaatggcatttttcctagtattaggacaattaaatttaacagcccttaatgtgtttgcaaaagaaaatgggaatgacgaactaacttatgaagttcagtctaaattgacagaagataaaaaatcagctgatttaaccattaaagtaacaccaaaaagcgatcaggtgaaaatcttgactattgaaacacctgatggagagaagagagagggccaagaagtaagctataaagccgaaaaaaatggcacaactaactttttaattaattatcaaaatacaagcgaagaaaaagcagaaactaaaacatatactgcttcttatgaagtatctgacatagtttctgaagatggagtaaataaagattctgacacagagaaggcaactgaaaaagaagatgctaatattcagcctccttctactacaaataatactaaaaatataaaatcacttaaatctggacaaacaacagttgaactaaaaataccagattatgaccaaacagcatgggcaaatggtgatattaaagaagtaacagcgacagtgaactttggcgacagtacttctactggcaaaaaagtgaatttcactttaccagatggaatgcgttttgtttctttgccagtaccgagtaattatcaggctggtacgaatgaagatacaggcgttttgagttatttaggagcaagtgatccactaggaatagccattacttcggtggaagtacctaataaagaaacagcatatagtcaagctacgtttggaacagtaagttatgagctaagtccaggaactgaaaaagcgagctttaaattttcagtacgggtagatgcagcaaaatattacggaccaactgacttagcagatccaattaaaacagaagtatataaaggagaggcaagtacacctgttgcttctgcagatcaagcaattcgtgcggaaggaaataaagttgtagggtatgccgatcaaaatcatgtgaaaactatgtttcgaacttggtataatgatcaaagactatcagaagtccttgcaagtacagatactaccgactcttataactatacaaaatcatactctgtcgtgaatggatcgaatagtttagacagtcgtggagcagcagtatacattgctaaaaatatcgaagtaacactttattacccggaaggaatggagtttgtaaatgttgtaaataatgctggcacagtgctgaaggaaaattctaacgtaactattactaattatccaagtgaaaataaagttgtcattaataataagcacttaaacaacagcgccactagtaattctatttatggagtcaaatataaagtacctaaaggaactcctgcaggaacatacagcacagcaaaagctcctcatgcagttatcacaacatatgatggagaagtatttgaatcagatgcactgacaactaatcctaacgatttaactactatagcacctctagacacttgtaaagttgttgatactaccgaaaataaaatgactttgactacagcaaatggtcaacttaatccaaataacgaaacttgggctggtagcattcaaataaataataaaaaaagtgctggtgtgaaaaaaaatcaaatgtatcaaattaaatttgaccctaactgggaagcttatatggtcaatatcccttttgatagcactatttcaggaaacaaaatcagtgaagtacagtataaaacaaatttaaacgacgcttttcgaacatttgatggagcgcttattaaaaataataaccaaatgtatcgactagatgcaaaagcagttgggcttgaagaaggggaatatttcacagaagtaaaagcaaatgtgggagattttgcgcctggatatcagagcacagaagcttcggctacttatcgttggaactctactgcttcatacggtaaaatcaagccaggcgttacatctgtccaatatgaaggcgcaatatgggacgcggatgatgagtccaatacgaaagtatctggcatatcaacctataaagtttcaagtgcagaaagtacagtagcaaatggtacagcagctttctataataaagctggtacaaaggtgaaaacagctagcgcaggagaaacaattaacacaaaagcgacattagtgttacatgattacccttatggaacaagaacggtcctcaatgatccagaagtttatttacatgctctagaaggtacaacaattcaaccttcttccattaaactaacggatcaaggtggaaaagatgttaatttcacagttgaacaagaaacggcaaataatggagataaagtatacgccttaaaaacaacggatgtgtcagtgggagtatatgttggctatccaactaaacataaatatctaaatatcagttacgatacaacgtttgatgtaactctaaataaaagtattaatatggatgcgcaacaggtcattgcatggggagcaaatgttactccggcaacgggaactaatactttttcggatttagggctagatgtaaataaaaatggcagagacaatgataaattactttctgtcaacagtagtactttaagtattccaaaacaagacacagttactgtagaaaccttcttaagcgtggctggagaaggcgataaagcagcttatatggaaggagaagacagtacagtttcctacttctcaccaggaacagatgctgattatacagtcaagattacgaacacttctagtgggaacgcaagtacatttgagctttatatcccaattccaaaaactggtcaagacttcggatctaaattccaaagcgagccgttcaagtgggatatgaaactaaatggagcgctacctgttagtgcagaacaacaagaccaattcgatgtaagttacgcaacaaccgcaacaggagacaattatgattccaccgacatatactcaaatactgttgctgattatgaaaaagtaaatatggttcgaatcaaagttaaaacacaaattaatgcaggcgaaacacaaaccttcaaagtgccacttaaagtagatgaaacatttgattcagcaacagaaggcaacaaaattggtgaacgtgatatttacaacccatattaccgtgtaattactaatacgttcgctggttcattatctggaacaaaagttggtgctgaactagtaattggtgaagtagcaggtatgctatttaatgataaagatgttaacggttcgtatgaaaaagataaaggcgatgaaccattagcgaatgaaacagttgagttatacaaatggaatgtatccacatctgaatatgaacccgccaaagtaggcgacaaaaatataactgccacaacagatagcaatggtaaatacagttttgattatagtgatggtgttggttatggtaattatgcagtgaaattcccagacaaagctggctaccaatatacattaaaaaatattggtaaagatacttctctaaatagtgatgtaccttacagcggagcagatagaggttgggcgaaacaaatcaatccaactttaccaagctcacaatatacaaatgcaggttattatgcttataatccgacgcaagatttaaaagttaacctagatgaaaaacaagttcaaatgggtcgtagtttagaaatcactttaccaaaagtagcctcaacgactggacaagctgccgaagataccattgaaccaagcttctttaaaaatattaaagcaacaacaaatggctacaaatggactgttgcagatacaaaagtggcaacagtacaaacgctagcagatggttcagcagctgtagtcggcgtttccacaaataataaaacaattgatgtaacagatttaacgattaccatccaagatatttttggaacagaaaaaagttccaaagctccagtatatgttactggaacagatggaacggttgcgcaacaagacggttacaccatgggtgcgactgacttttcattggaatataaagaagccactgatttaacgaaagcacaggcactaactcttgcgaaaacagccgcttttgaagaagtaaaagacggcgttaattcaagcgcagaagatcgtttagaccaagttcaagtaaaccaaacacaattagacgccataaaaaatggttctaatcaaggtggcgtgtatccattaacttacacgataacaaaagatagcaaaacggtttcagttactattcaagtaactgtagcaaaagatttaaccgcagtgaacgcacatgattctactatttatttaggagacacatgggatgcggaggacaactttgatagtgcagcaaataaagaaggcgacactaatgtagcgtttagcgatgtaacagttacaggaagcgtgaataccgcagtagctggttcgtatccagtaacttacacatataatggtgtctctaaaaaaattaatgttactgtcaaagataaattaacagcagttaacgcacatgattccacaatctatacaggtgacacatggaatgcgggagacaactttgatagtgcgctagataaagatggtaattctgtcgcttttgctgatattacagtgacaggaactgttaatacaaatcaagctggtactaataccatcacttatagctatgatggagtttcgaaaactattacagttaccgtcttagaaaataaggaaggtatcagtgctcatgactctactatttatgtaggagatgcatggaatgccaaagataacttcgatagtgcttttgataaagatggaaacgcggttgacctagaagacgtaacagtcacagaaaaaccaactgtagatacgacaaaagcaggtgcttacgaagtcacttacaagtatggaaaagtatcgaaaaaaatcactttaacagtgaaagctaaattaacagcagtcaacgcacatgattccgcgatttacatcggagatacgtggagtgcagaagataactttgacagtgcgctggataaagatggcaattccgtcgcttttgctgatatcgaagttaaaggaaccgttgatacagacaaagttggaacatatccagtcacgtacacatatgacggtgtctcaaaaacaattaatatccaagtaaaagacatcttaacagcagtgaacgcgcatgattctgaaatttatataggggacaactggaatgccaaagataattttgacagtgccaaagataaagacggaaatacagtaaattggaaagacatcaatgtttcggaaaatccagcagttgatttagaaacagttggtgtttaccaagtgacttatagttatggcggtgtttcgaagacaattaatctgactgtccatccaagaaaaacaagtttagaagttcatgactccacaatgtatacaggagataaatggaaagcagaagacaactttgataatgctacagataaaaaaggtgaccaaattcctttcaaagatgtcactgtaaccggacaagttgattctaaaacagcaggcacgtatgaaataacctatatctatgatggattgaaaaaagtagcacgaattactgtaatccaaaatcaagcacaaatcactgtaaaagatagcgtcattccatatggcggaaaatgggaagcagaagctaactttataggtgcgacaaaccgagatggtgtagcaattcctttctccaaaattaaggtagatggtacagtagatgtaaataaagctggtacgtacaaagtgatttacacgtatgatccaaatgaaggaacagtagatgcaggtaagaaacaactttctgtcacagcaaatattcaagtagaagcagaaattgtaaaacctataaaacctataaaacctataaaacctataaaaccagttgatccatcaaaaccaatagatcctaaaaaaccagtaaaatcatcaaatccaacaaaaccatcaacagaaaaaacaccattaaaagtagttgataacaagcaacatacaagaacatatgaagaagcaaaaccattaccaaaaacaggtgaccaaacaaatacttgggtaatatggacaggcgtatgcttgctaagtatgagcttgcttctatgggtggtaatgagaggaagaaagaaaaactatcagtaagaggaaccaacaggtaaaggaaagacaataagaaggtaaaataaataccgaccagaaaaatctggtcggtattttttatcgagaaatatagaagttaactgatgttttttggagataaagctattcatttgttaattcagtacaaccaccaaaccacaactccaacagtccaaaccatcgcaagcggcactaaaatccggaacttcggtttttgtgttttatggtgaaacaactgcatcgacatccaactaccaaacgccccaccaagaaatgcagagaaaagtagcacagattcaggtatccggtaagcatgtttaattgctttccgtttatcaatagcgaataatagaaaagaaataagcgttatcgcgattaaatatattgttaaaatcatttaggaatcccccttcattgctaaaacaaactatattgattagaataaaagcataccataaaagaaagcagggataaaatggcaaaagaaattattcaaacatcgtcagcaccaaaagcacttggaccatactcgcaagctgtaaaagtgaatggacttatttttacatcaggtcaacttggtattaacccggctaccggcgaattagtagtaggcgcgacaaaacaagccgaacaagcatttaaaaatttagcagcagtattagaagaagctggttctggactggacaaaattattaaagcaactgttttcttcaaagatttaaatgaatttaaggctgtgaatgaagtttacgccacgttcttttccagtgattttcctgcgagaagtgctttccaagtagcgaaattaccgctagatgctgaaattgaaatcgaagttatcgcagaagcataaatattcagaaataaatttgacaaccacgagaaataaacgatataataagaaccaattacatagtaacttatcaagaaaggtggagggttctggccccgtgaagccttggcaaccggatttttcacggtgccaaatccagcaggtaacactgacagataaggcacgcgaatcaggtaaattactctttcccttaaaagctgtcttttaagggaaagtttttttatacataaaaataataagaattgaggcgaagaaaatgaaccaagtagctccattttatgcagatcatgtgggaagtattttacgcacaaagggaattaaagacgcacgagagaaattccaaagtggcgaaataacagccttagagttgcgcaaaatcgaaaatacagaaattaagtatatcgtcgaaaagcaaaaagaagtcggcttaaaatcaatcacagatggcgagtttcgccgtgcttggtggcattttgacttcttggagaatttggatggggtagaaggatacgatgcggctggcggcattcaattcagcaaagtccaaacaaaatcgcattcggtaaaaatcacaggaccaattgactttacgacacatccatttatagaagattttatttttctcaaagaggctgttggtgacaatcatgtcgcgaaacaaactattccaagtccagcgatgctccattatcgcggggatatagagtatcagccttatttagatgatgcagagaagtttgccaatgatttagcgactgcgtatcaaaaagcgattcaagcattttatgatgccggttgtcgttacctgcaattagatgatacgtcttggagttatttatgctctgatgaacagcgtgaagtcgtgcgccaaagaggttttgacccagaaactttacaagaaacatataaaaatcttatcaacgaagcaataaaacataaaccagctgatatggttattacgatgcacatttgtcgtgggaatttccgctccacatggattgctgaaggtggttatggtccagttgcagaaacgttgtttggcaaactaaatatcgatggtttctttttggagtatgataatgaacgttctggagattttgcgccactaaaatatgttacccgtccagacttgaaaatcgttctaggcttaattacatccaaaacaggtgaattagaggacgaagcagccattaaagcacggattgaagaagcgagtgaaattgtgcctctaagccagttgcgcttaagcccgcaatgcggtttcgcctcgacagaagaaggaaatattttgacggaagaagagcagtgggataaattgcgatatgttgtccggcttgcgaatgatatctggggcgaataataaatgaggagaactagccgaagagtttgtgctagttctttttgtgtctttacaaaaagggcgactagggatagaatagatgttctagaaggagggggagccctttggacgataaattacaaaagaaattgaccttattacctgaatcaccaggttgttatatttatagagatgaaaataatgaaattctttatattggcaaatctaaatgtttgaaaaaccgcgtaaagtcttatttccatagcaaacaaattggaaaaactgcaagactagtcagacaaattcgagatttagaattaattattacaacttccgaaaaagaagctttactactcgaaatgattttaattcaaaaataccagccaccttttaatatccagttaaaagaagggacgagctacccatatatcaaaattacgaatgaaaaaaatccgcatatcgaagttgtatttgaagtaaaacgagacggtgcgcattattttggtccttatccaggtcgtttttcagcaagacaaacggtggacctaattgaaaaattgtttccactttgtcgatgtgacggtaagccaggacgaccatgtttgtactaccatcttggattgtgcctaggtccatgccaagccgaaattgagccggctgtttataaaaaacaaatccataaaattagtcggtttcttgaaggtgacgtgaaaaatgtgaaagataaactactgggggacatgttaactgcaaccgaaaatctcgaattcgaaagagctgcagaacttcgagataaaatacacgctattaatgagacaatcgaaaagcaacatattatttttcctggtctaaaaaatcgggatataattggttgctatgaacaagataattatttaagtgtcttcgttttcttcgttcgaaatggtgcaattaatggaagtaaatggcacgttttccaagtcgaaaaaacccttcaagaagagttagccacgtttctcaatcaattttatgaagatcctaacaacattcaaccaaaagagttgttaatcgctgaaaaaatagataaaagcttgctgaatgagccgcttagaaaagcttgtttatttccacaaaaaggcagtaaaaagaaacaagtagacctggctatcgaaaatgctaaaagtgcttatattgcatacgcaaaaatgaaagaatatgattttgaaatacaactaaacaatcattagaagctaatttttaacgattagcttcttctctttgttgtgttgaaaatcttatcttaaataactatggtcaataacctacccttatggtaaaatcttacgagtacggaaaaaatttatgctacataaaatatttaattaaagctaaacacatatagagggaggacacaatatgaagaaattttcacgcttcatactaatgatggcaattgcttgtgttgccgcatttattttcacaggaaacgggttaaatgcaaaagctgcggaagaaatttacttgattggtacagacacaacctttgcaccttttgaatttgagaaagatggagaacatgtcggcattgatatggacatcctaaaagcaattgcaaaagaccaaaattttaaatacgaaattaaagcaatgggattcaatgcagcggtacaagcactagaagctaaccaagtagacggtgttatcgctgggatgagtattacagacgaacgtaagcaaaagttcgatttctctgacccatactttgattctggtgtcgttatggggattttgaaagataacgacgaaatcaagacatatgacgacttaaaaggaaaaaaagtagctgttaaaacaggtacagaaggttacgccttcgcagaaaaaatcaaagataaatatgactttgatatcgttgtgtttgacgactcagctcaaatgtatgacgatgttaaaacaagaaattctgtagcatgttttgatgattatcccgtactagcttacggcgttcaaacaggaaacggcttaaaaattgttactgagaaagaaaaaggaaactcctatggttttgctgtcaacaaaggcaaaaatcaagaacttttagagaaattcaatgctggattagttaatattaaagcaagcggcgaatatgaaaaaattttaaaaaactatttaggtaaaaatgcgattaaagaaaacacaactgaaaaaggctttatggggattattaaatcttcatggccagcactattgtccggtttatggttgacgattagattagccgtagtttcgctaattatcgccttcattattggtattacattcggatttatgaaagtgagcaatagcaaaatcttgcgtgggattgcgactgtttatgtagatattttccgaggaaccccattaattgtacaagcattcttcttttactttgggattccggcagcacttgatttcaggatgcctgtattcttagctggagttatcgcgctaagcttgaacgctggtgcctatatggttgaaatcgttcgtggtgggattcaatcagtcgacaaaggacaaatggaagcagcaagaagtcttggtttaccgcataaaaaagctatgatgaaagttgttctaccgcaagctattcgaatgatgattccatcctttattaatcaattcgttatcacgctcaaagatacatcgattatgtcggcaattggactcgtcgaactaacgcaatcaggtaaaattattatggcgcgtacattcgaaagtacttggacatggctaatcatcggaattatgtatcttatcgttattaccattttaacgaaaatatccgatcgtttagaaaggagattacgaaatgactaaacttaaagtaactggcttgaaaaagagttttggcgcaaatgaagtgttaaaaggcattgatatagaagtaaaagaaggcgaagtagtttgtgtaatcggaccttctggctcaggtaaaagtacatttcttcgttgcatgaataacctagaagaaattacagcaggtgaagtagttgttgatgattttaatattactgataaaaaagtagatattaataaagttcgcgaaaatatcggcatggttttccaacattttaatcttttcccacatttgtctgttttggagaacatcacattagctcccgttgaattgaaaaaaatggataaagaagccgcgaaaagtaatgccttgcgtttattagaacaagtaggattacgagaaaaagcggaagaatttcctaatcaactttccggtgggcaaaaacaacgggtggcgattgcgagagcacttgcaatggatcctgacattatgttgttcgatgagcctacatcagccctcgatccagagatggtgggtgaggttttaggcgttatgaaagaattagctaaaggcggcatgaccatgatgattgttacgcatgagatgggctttgctcgtgaagttggcgaccgagttatctttatggatggtggctatattgttgaagaaggcaagccggctgatatttttgataacccaaccaatgaaagaacaattagcttcttagataaagtattataaacagaaaagcaagatgactttggaatttccaaaagcatcttgctttttttactttaagttaggactttttctattttgcgattgttgctcataggcataacccatatttaataagattttatcgctatttctagcagtaataaaagtcaggctaattggctgatttgattcttcatcatagccagctgggatagtcagttccggattccccgcaattggcgcaagaaacatcaccgaacctcccataccaattgttacgacagcatccagtttgtctttttgaagcacagagtcaagttcgttttgtgagctctgaatcaaattactcgccaaattgtccgcttgttgtttcgttattgtgctttgctgtgctttgacaagttcggcttgcccgtatttcatatttcttgtaggattcgtttgattaaattgaataatcgattccaaagtcgacataggagaatggttcacttgcaaaaactggtttaaatcatgtttaaagtcagtatttattaatgaggcataatcataagattctttctgttcaaattcgcccactgcaatgccttcaatgatagtagcgccagctttttgcagatcaagttttattttctttataacagctgtttcttcattactctctccatctgccaaaagaccgatacgtttacccttaagggcgtccgtagaaagagatggatttgaagtagtgtttgttaaagcgtttgctgtcaaataggcatcattaacggttcttgttagcggtccaggtgtatcaaatctgcttgatagaggaattatgcctttgttatttactaaaccttgagatggcttatatccaacagccgattgagcagaagcaggcgtaataatagaaccatttgtttctgtgccgattgcaattgctgcaaaatcacttgtggctgctgtggcagagccagaacttgaaccagatggatctaaattcgctgagtaaggattcttactttgtccttttttacctgaatagccatttggaagatcttcgtccattccagccgcccactcggacatattagtttttccgaggattaaagcgccattttcctttagattttcaacaattgtagcatctttcccgattacccaatctttcaaggctacggtcccagcgctcgtaggaagttctttcgtaccaatgttatcttttaaaaggaccggcataccgtataaagcagatttgttggttgtgttttctttatccagttgttctgcttcggcaataatagttggattgatttcagttattgcatttaaatttaggccattttggtcatatttttttattcggtttaaataaataccggctaattctttgtagctaagttgttttgtcgcaataagttgctggagttttgtaacatcagcaccgatgataagtggttcttttgcttcaagaacagtcaaatctagcgtagctaattggttattaatcggtgtcataacacgcgctttatcataaaagggactaggtgaatcttctggcttttccggtttacttggtattggttttacaggtttaatgttctgttttttttgtgggttatttttcggtttgactttaatctcagttctatttttgagcgaactttgaaaaatacggtcaattatacgttctacttgtaattgcatattgtcgaagcccttttctaaatgaaagtcctctttatttttgccaagtgttaaattgtttgatgattgttttggtttttctttctttacgatggattttttatttttagaaacggcacttttattttctgatgtagtatttttttggctagtaaagaatacgtagccaccgatgatactgaagactgtacaaactacgataattgttattaaaatgcgttttttcatgttattcctccgatgtttaaatatgtaatataattatatagcatcgaaaaaagtaaatctgtgacaattttgtgaaaactaaaaaaattttttaaagcaacttatttatgcagtgaattgaactcaataatagctgattttcagagtttttccttagacataacttttttggaaaaagagaaatgtaattatagcaatggtttgaaggtaaataatatttctgtgattgtaaaacttcatagaaaagacacatttttaataaaatttgccgattaaataccaattccattagtttttattttatactaataattaagtctgtttacatatttgcctgaaaatggtgataatagcatagttaaagtatggtttatcggtgtttttctttatattaactggaaaataactaaaaaaattcggttttcaaacgctttcttgaaaaaaagagaagataatggttagttttttaattaatagggtattcttagtaaagagaatatgttaaagtaaggaaagagagaaaaataaaaagaatgaaaacaaattttgaagatggagtgatgagattggataataatcaaaaagacttaaatcaagtaatccgtcagctcaaagaaaaaggaattgtcgttgaaaaaacaaagtcacgaaaagatatttggaaatcggttagtagtaaagcgatgccgaatatgacacttcgattgcagtaaatcgaaaagtggagtttttatatggtattttgtgaagctttgaagtaactaaaatgactcaaagcagcatgatttacatataaaataacttcactttttttctttgtcataaattagtcattaagttttgatgtttctgttatcctttttacgcaaaaatgttgtatgatggagtggaaggcttttgtcatagaagaaaatagaaatagagtgaggcatatacatgaaaaaagaagcggttaaccaacaatctatttatgtgcatattgatcatgttattaataatgtggcgacaagcggcatttctttttgtgatttcttaaatggcgtgggacagccccctgaaaatattttgttaattaagcataatattgaagatgcatcctacaatgcgcacacagcttttcactacctagagccaggcgatttagcgaatatttccaaagagaattttaatccactatgttggattgattttgaagatgtggagcttttaaaccaactaactccacaagaagtagcggagatgctttatcttgcacacactgggcgccatttgcgttctccattttattataaattacaaaataattttgtttacttaactagggaagacggtcgttacaataaagtatattaccggaatcttaatcatttttatatgttactaagttacgtcattgcacgtaaaacggcagaactagttaatgagaagggtattttttcgtttggtaagaaaaaatatgttgcggagccgccagtcgaacttttgaaaaaaatggcagatcattttaaagacggtgcttgtattgcgcttgatgatgtcgtgagaacgcgcacgcaaattgaagtaccaattgggcacgggctaacagaagaaatgaccgaattagagatttcttccaaaatttattatgaagaagaggtcgccaaattagtctatgatttaaaacaaaatgaatggaaatatatcgaaaaataaaaaatcaaactttttcctttacgtttggttttttatttgctagaatttaactaatgaacgttagttaggaggttgctttatgacgaagaaactgattaaagaagtcgcgttaaccctttttgcggaaaaaggctacgatgggacggcgctttcggaaatcgcgaaagctgttgggattaagacaccatcgctatatgcccattttgcatcaaaagaggccctttttttggaagtttatcaagatagcatccagatggaattaacagaactcggacgagtagcggagcgagaggatttagttggggaagagaagctacaatcaattttctttgtggcaacagatttttctagcaatcccgatgagaagaaatttttccagcgcgccgtcttttatccacctaagtcactttttcaagaattaaaagaagaaacaaagacatatgaacaactgacgaatcgaatattgcgcgaaacgttagaaaaaatagtatccgaagaagcacttgtaagatggatgcacgttttttatgcacttcttgatggactgagtgtggaacacggcatttatgatgaaacggaatttgagttgcgaagaaaatctgcttgggcagttcttgcaagtttactcaaatgaattggaggtaaggaaattggcttggttttatttgattatggcagggttatcagaaattgtttgggcttttggattaaaagaatcacatggtttcacgatgttaggttggagccttttgacgatagcatttttgattgttagttttggtttgttttcgatttccatgaagtcaattccgattgggacggcatatgcggtttttacaggaattggggctgcagggacagctattattgggatgattttcctttcagaaggtgtttctttttggaagattgtttcgcttatcgttttattgacagggattattggtctgaaattagtggatggcaatgagtctgaaaaggaggctaaataacgatggattggatatttttactagtagcaggtttatgcgaaatggtcttcgttgtcatgctgaaattatcagatggctttaaaaaggttggatatgcgatactgacgattatttttatgtctgcaagtttctttttactatccctcgcactgaagacgattccaatcggtacaggttatgcaatttggacaggaattggcgccgttggtagtgtgacacttggaatgattgtatttaaagaacgcaagagtgttggtaaattgctctttattacgatgattattgccggtgtggtcggattgaaattaacatctggcgtttaacaagctaggttgaaaaagtcctttttggaataagcgtgttcgtttcttatttaaaaaagaagtttttttcaacctattttttagttataccttttcatcctgtcaaaacatggtaaaatagataaagcgaataatgacggaggggtattatgaaaactaaattaattttattatacggtggaaaatctgccgaacatgaagtttcattacaaacagcattttcagttatcaatgctttggatttagaaaaattcgaagctgcgccaatatatattacgaatgaaggtgagtggattcaaggaccacttctttctgggaagttagattttgtcgaacaattacgtttttcggctacagatacaataaaacttgctacaactgaatcagaaaaatcagaaggggaagcaattagcccggccgttttagaagcagacggacaagagacagtcgtattcccacttttacatggtccaaacggagaagatggcactgttcaaggattgttcgaagtattaaacattccatatgttggcaacggggtcttggcatcttctgctgcaatggacaaaatcgtgatgaagaaaatttttgcagatgctggaatcccgcaagttccagcagttgctgttcgtttaattgattggaaaaattatcaagaggaaatggttgctgagatggaagaagtccttacatatcctgtcttcgtaaaaccagcaaaccttggttcgagtgttggtattagtaaggcaacaaacaaaaaagaattagtggacgcaatgacagaagcgtttttatatgaccgtcgtgttgttgttgaacaaggtgtcgttgctcgtgaaatcgaaatgggtgtacttggaaatgatacgccagtttgctctgtacctggcgaaattttgccagaaggtgcagttgccacattctacgattacaaagctaaatatcaagataacaatactgcgttaattattccgactgaagtagatccagaaatcttggaacaaatgaaagaatatgcgatccaagcgtttttaggtctggacgcaagcggactagtgcgagcggactttttcttaacggaagataatcagttattcttaaatgaagtgaatacaatgccaggtttcacaccgtacagcatgtatcctcttctttggcaggaaacgggcttaccgtacggagcgttaattgaacgattagtcgatttagcgaaagaacgccacgcagccaaaaatgcacttaaatataaattagaagactaaaataaacaagaaagcagttttcatatgcggaagctgcttttttatggaagagagcgatttaatttgaaaaaaacagtaggcgaagtagtagcaatgttagatagttccatccatgtagatgcatttcgcgatgtcgtcattactggcgtttgttttgacacaaggcaaataaagtcaggtgatttatttgttccgtttgtagggaatgtgcgcgatggacatgaatttgtggggcaagcacgagaaatgggtgctgtagctactttctggcaaaaaaatgtaccaaatccaccgacggatttcccggttattttagtagaagatactttgctcgcgcttcaagaactagcggcgaaatatatccaacaagtaaaaccaaaagtcattgcgattaccggaagcaatggtaaaacgacgacaaaagatattatggcagcgattgtagaaacaacgtacaaagtgcattatactggtgggaactttaataaccatatcggcttaccatatacgattttaacgatgccagaagatacggaagttgctgtacttgaaatgggcatgaatcatcgtcatgaaatcgaagtgctttccaaaattgccaaacccgatatcgcgattattacgaatatcggcgaggcgcatattgaatatcttggttcgcgtgaagaaattgccaaagcaaaactggaaattactgccgggcttaatccaagcgggattttaatttatccacatgaagaaactttgctgctaggaaatattaatggcgatttcagacagctcacttttggcaagtcggaagctgcggaaatttatccgttagaaattcgtgcggaagcggaaggcacttcttttataactaattgggagccggagctagaaatttttgtccctattattggtgaacataatgttttcaacacaatggcggcgatgcttgcggcaagagaaattggaattgaaggcgaaaaaattcaatctgcgctgaaaaatatggaacgttctaaaagtcgtttagaatggattacaacgaaaagtggcgcgcgtattttgaatgatgcctataactctagtccgacagcgctcaaaacggttttaaaaacattcatgcatatggattcgagcggcaaacctaaatatttggtccttgctgatatgctggaacttggcgatttgtcgacaaaactacaccaagaatcagctgaggtgttagaaaatgatacgattcagaaagttttcttatatggtgatgcgatgaaagcatttggagaagtagcggaatcgaaaattggtcagggaaaagttcatcattttgacacgaaagaatcgcttgagacggcgcttctttctgaaataaaaggaaatgaatggatactggtcaaaggttcttacggaatgggcttgaaagatgtggtagaaaatcttattattaagtaacgactaaaattggacagaacatattaccacttaaatggtaataatttggacaggaggaaaggcataatggttgcttgtttgtgtattcatggttttactggttcgccgtccgaggtgaagccgctcgctgactatttgcgagagcatacagattgggatgttttagcacccacattacctggccatgatcacctgcgccacttaaaaaatgtgacgtataaagattggattgtttttgtagatagtattttaagccaaatgctaaaagaagacgatgaagtatatattattggtttttctatgggtggactgctcgcaggctggcttgcgagacattatccggaagtgaaaaaactagtacttctaagcacagccgtaaatgcaatggaatggccacaacttgtcgaaaattccaagcaagtattaacggaagcgaaagaagtaactctcaaaaacagcccgatgttcaaacggtaccaaaagaaagtaacggaaacgccttggacttccacgctacaattcaaaaaaatggtagctttagcaaagccagtttttgaacatattgaaattccaacttttatagcacaaggcagtgccgaccaagtagttcctgctgaaaaaagtgttaatttcttaatggaaagtattcctggtccaaaagaattatttattttagaaggttcgaaacacgtgatttgtcaagatgaacaagcggacaaattatttgcagctgttttaacatttttgcaaaaagatgtcgctgttttaaataccaaataaagaaaaccgattcagctctcgctcgctgaatcggtttttttattttcgccaacagaatctcgggctattaaattagttgcaagcgccagatgaacaaaaccttcatctggttttcttatgcgattatacataagttcgacagctttctcgcccataaaactaaggttagtacacatcgttgtcagctgcggattacttagtacagtaaactcggtattatcaaagcaaataatagataagtctttcggaatattatagcctttcgattgtaagtaagtgttgagaataaatccaagacctgagttgacgcaaaaccaagcagtagggagttcgtctagttcgtctaaagttctatacaatgtagtttgttcttctttgatgcgagtgatagcatattttttgttaaaaggaatgtgatagtactgcaaagcttttttgtatccttctagtcgttcttcataacttggagaaaaagttacatcaccaagaaaaccgattttttggtgcttattttgaattaaaaattccacagccataaaagcaccgtctttgttttgactaataactgcatcggcttttaaatgcggatcatgatgatctatcagcactactggcatgccgaggtcgatcacttttttactataatcggtgttaatatgcgacagcaagaaaataccagtccagttctcacttgtaagctgctccggcaattgatttgttgccgcttcctcatccgtaactggaaaaatgataagttcggcctggtgggcgataatgctttgtttcatattatcgataatttcaccaaaaaaactgcgctgcgaaagggcgaaagaagttgctaaaagcgcaaatttttctttgacaacctcacgtgcgatttctcttttatatttataacctaattcatctgccattttaaaaacagctagtttagtttgttcgctaaccccatttttattgcctaaagcttgcgagactgaatttttggttatatttagcctgtcagcaatatcctgcatcgtaactttcttcatggttcccctccgttttcctctatttattctattatagaagtaaattcacaaaatagcaaaaattttataattaaaaagtaatgtataaagtaattctttttatttttggcagtaatgcgtataaagcttaatgatattaggcctattaaaagtaattattgacattacaaaagtgtaatgtgataatgtaatcgtaatcaagcgcttacaattacaaaaaagtggaattaggaggattattgatatgaagattagaaaaattgctattgcagctcttagtgttgtggttgctgggtcattactcactgcttgtggtggtgggaacagcaaaagcgacgataatggtaaaacaaaagtaacgttttgggcagctccaaatccaactcaagtaaaatattgggatgaaatggcgaaagcttacgaaaaagaaaatccagatgtcacgattgaagtttcccaaatgaaagaaagtccatcatcggaagcaactatccaatcagctattgcctctaaaacggcgccaacaatgtctgaaaatatcaatcgtagtttcgctgcgcaattagctgacagtaaagcgattgttcctttgaatgatgtaaagggacttgatgatgttgtcaaagaacgaaacatgagcgaaacaatggattcttggaaattctctgatggcaatcaatatgtgctacctgtatactccaatccaattctttttgcttggcgtttagatacactcaaagaacttggctatgatgcaccgccaaaaacatatagtgaagcgctcgaagttggtaaaaaactaaaagcgaaatatccagataaagtgctttgggcaaaaggggatttatctgatccaactgcttggatgcgctggtttgatttcttcccactttatgatgcagcttctaaaggaaatgcatttgtagaagatggcaaattagtagcagacgataaagcaggaacagagttattaacatttatgtctgaattgcaaaaaaataaattacttcttgcaagcaaagcaacagatccatttgaaactggaacaagtatcatggcagataatggcccttggactttcccgaactgggacgaaaaattcccagaacttaaatataacgaaaactatgcaataacagcaccactagtaccagatagcatggtgaatgaagaaaatgttgctacatacgctgattcgaaaggcgttgtaatgtatgcacaagcgacagataaagaaaaagaagcggcaatggatttcttgaaattcgtgtacaatgatgacaaaaatgacttgaaattcttagaaacaactaacttaattcctgcgcgtgatgatgcaacagaaaacgaaactttcacagctttctttaaagaaaatccagaactcgaagtttatgcagctaatgtaccatatagcattcctgcgatggatgacgcgaaatataatgatattcaacaaatcattggtgaagaagcatggaatccgattgttcgtggggagaaaaaacctactaaagcttggtcagatatgaagaaagctgaggacggggtgcttcaagaatgaagcggcgaaacaacaaattgggctggtcatttaccagcccgtatctcatattcacagcgatatttttcttagtaccgcttgtttggtcaatttggttatctgtgactgattggaacatgatgagtccggaaatcaattttgttggctttgataattttattaaagcgttcactagtccagcagttcaagcagccttttttgttacttataaatttttgattgtttttgttcctatggcgttaattatttcgatgattgtcgcggtattagtgaatggactaccgaagtttaaaggactttatttggttgcgtttttcctaccgtatttgtcttcaggagttgtaacttcgctaattgtacaagggttgctttcatacaatagtgcgctgaatgtgtttttacgcgggcattttggttgggatatcgattggctcggaacaccaatgtcggcgctcgttattatttcactaatgatagcttggaaaatgtctggttattatgcgctcattttaatttctggacttgctagtattaatcatgaaatttatgaagctgcagcaatggatggttctggtagatttagaacattttggaaagtcactgttccgatgctatatccagctttatttactgtgattgttttagcggtgggtgttagctttggtattttcaccgaagtttaccaattgactggtggtggaccgaattttgcaacaaatacatggcaaatggaaatttttaaccaagcattcgttaacttgaattctggttatgcttcagcgatttctctaatggctgctactgtaacatttgcatcgattggtgttattaagaaaatgcttgagaaatggggtcaaagaaatggttggacataatagtaaagcgggtaaaattgttcgctatatactgacaacattactcatgctgatcatgatttatccgtttatttatttggttttaaactcatttgctgcttgggatcaggtagataaaaagttgattccgacagaattcacgactcgttcgtgggattggttatttggtaattcagtcgttgcagcaccggcgccttggattcatgcctttattaatacaattattgtttccaccattgcgacaggcttgatgttgcttttcggcctaatggtaggctacgcactagcaaaggtggattttaagggcaaaaaaattgttaataatgcgattttatttcaaatgtttttcccggcaatcatcttgctgattccacagtttttaatgattacggacttcggtttattggatacatacgcgggaatgattatcccgacaatgcttagtttatgggccgtatttatgtataccaactttttcaaagcgattccagatacattgattgaagctgccaaactggacggggcgagtgatttgaagattttgtttcgggttgtgctgccaatgtctaaatcaattacgaccgtcattttcttattccttttcacagacagatggacgaatttactttgggatatgcttgtaacgaagagtgatggaacggtcacgttgaatgtgctaatctcgcaaatgtttggaccgtatgcaacctatccaggtccaatgtacgcggcttcggtgctgctaacacttccgctaattattctattcttattcttctcgaagaagttccaagaaggaatgcaatttactttgaaataaaaggagcgactaaacttggagttttggcgtcgtagtgtgttttatgaaatttatatgaaatcatttcaagatagtaatggtgatggtttgggtgattttaaaggtttaacgagcagattagattatctggtggatttgggaattgatggtatttggctgactccattttatccttcaccgcaagtggataatggttatgatgtgtctgattactgcgatattaacccggattacggcgatatgactgattttcgagcgtttatgaaagcggcagatgcacgaggaataaaagttattatcgacttagtattaaatcattcgtcaacagagcatacttggtttaaggagtcgcgtagtagtaagacgaatcctaaacgagattattatatttggcgagaaaaaccaaataattgggaatcgttttttggtggttctgcttgggaaaaggatgaacttactggcgagtattactatcatagttttgcaaaagaacaggctgacttaaactgggcgaatgaagctgttcgcgcagaaatggagcaagttttagcgttttggttgaatgagggagtggcgggattcaggttagatgttattaataatttaacgctcgtacttgaatttccggataatccagtcgcatctggtgaaatggagcatgtgtatgaccgtaatcagagtggattagaacaagcgttagaggatatcgcttccttttgtcgaaaagagcgcgacgtgtttttagtaggcgaaattagctcggataaattacctgaaattgcgcgatatagctcgaaaaaaatgctagatgtcacgtttaattttaattttggcagtgttgatcagttagatgcaaaatctgtatttacgacattgaatgagatggaaacggcattaaacgaagggcagtggccgacgcttttctttggaagtcatgatatgagcaggttcagaagtcgcctcgcatctggagacatagtaaagacccagttgctcgcatttttaatgttaactgcgaaaggcgtgccgtttatatactacggagaagaggtgggtatgcctgatttaacgttttcttccgtaaaagagatgcgcgatattcaaggaacagccgcgtactatcaagctttacaaactggtacagatgaaaaacaagcactcgaaatcgctattgaaaaaacgcgtgacaaagcacgtgggccgatgattttcccagatggaaagccatttactcttggtgaaccatggattaaaatggctactttgccggaagaagaagcacggatgatgtgggatttttatcaagcattactcgcatttcgtaaagaaaatgattttaaagagatggaatatacttttttgaagttggatggagaagtactcagttatcagcgaggtgaatttatctttttacttcattttggtgaggaagagataacttatccgcttcaggggaactatcagcttgtttttggagaagcgatgatggtagaaaatggtattagaatgggcgcgcatactggaattgcgcttagagtggaggaataaaatgaatacaatcgaaaatttgttgcaagtttaccgggaaaatagtgctgcgtttgggacacgtatcacgttaaatggtgctggcgacaaagatgtatacaatattacggcaccatttcattggctaggacaagaatatattgcaggtcgagtggagtcgcgtgatagcgagttttcggaagtacgcttttttgaaaaaacagagacggacaaatatcaattggttgaaaatacgactgttttagcgctacaagatccatttgttacatttgttcagggtgagctgattattggcggggtagaagttttcccgaaagaaacggacccgactatgttagattggcgtactaatttatatcgggcaacctcgcttactaattttaagcaaattcttgccggaccaattgggatgaaagatttgcgcatcaaagaattagcagacggacgcattttagtattaacaagaccacaaggtgaaaaaggcggtcgcgggaaaatcggcgcaatcgttatggattcactaacagaattaactatagagaaaattgaagctgcgccacttttgaaacggaatttttcaggagaggaatggggtggcggaaatgagcttcatttgttagaagatgagagaattggcgtgcttggtcacatcgcttgttttgatgaagcaggtaatcgtcattattatgcgtgttcttttcaattgaatgaagatttttctcaaatcgagcaagaaaaaataatcgccgaacgtgctaattttgcacctagtgagcctaaaagacctgatttagcagacgttgtatttagcggtggtttaatcaggaatccggacgggactgcgacactttatgcagggattggcgattctgatgcacaaaaattagcaattcctgatccatttaaaaataactaatagtaggagttttgagtagaaatgaacatttatcgttatgaagaaaacccattaattacacctttagacgtaaaaccaatccatgaaggttttgaagtgattggcgctttcaacgctggtgttgccgaatataacggcgaagtgcttttacttcttcgtgtggcagaaaaaccagtcagtgagaatccagaagtagtccttgcgccagtttataatgcgacaagtaatgaattagaattacaaccattccgattagatgatgaaaattatgattttgaagatccgcgaatgattcgcagtaaagcaaaactagaaggtttttcgtatttaacatcgctatcgtatattcgaattgctcgtagtaaagatggtcatcagtttacattggatgaaaaaccgtttttatatccgtttaatgagtatcagacatttggaattgaagatgctcgtgtgacgcaaattggcgatacatatcacgtgaattttagtgcggtatctgagtttggtgtagcggatgcattagtgaccacaaaagacttcgaaaatttggagtatcaaggaaatatctttgctcctgaaaataaagatgtactaattttcccagaaaaaattaacggaaaatattatgccttacatcgtccaagtttgaaaagtattggtaatttagatatttggattgcttcttctccagatttgcgcagttttggcgatcatcgtcatttgcttggaattcgtcctggtgaatatgatagtggccgagttggtggcggatgtgtgccgattaaaacagaagaaggttggctgattttgtatcacggtgcaacagaagaaaaccgttacgtaatgggtgcggcacttcttgatttaaatgacccaacgattgtattaaaaagaacgaaaacacctattttagaaccagttgccgattatgagaagaacggtttcttcggtgatgttgttttcgcttgtggggccattcaagaaggcgatacactgcacatgtattacggtgtagcggatacttccatggcgggttgtgatatgaaaataagcgaaattttacatcagttagaagtggaaaacaaatgacttggaaacactatttgagtgcttggcaaaatgccgatttatcaaatgagtggcgccgtgaattacaacgagtggaagaagagcaggaacgttttgatggttacttaacatttggaactggcgggatgcgcggtaaaatgggtattggaacaaagcgcatcaatctttttaccattagacgagtagcgaaaggtttgggagattatgttgtcgcaaacgaaggagccgaaatgggcgttgcaattgcgtttgactctagacatcattcgggtgcttttgcgcaggaaacggcaaaggtcctagcggcgcagggtatcaacgtttatttatccgattcgattcgaccaacaccagctttatcattttgcgttcgagaaaagggggcattcgcgggcgtggtgattaccgcaagccataatccttctatctataatggtttcaaagtatatgataaaaatggctgtcaaatcacattgggtgtagcgcaggaaattgctggctatttagaaaaaataacggatatctttactataccagtgcgcgaattacccaatccactcgtgacacctctaggaaaagaaatggatgatgcttatttaaacgctttaacagcagtcgtttctcgccctgacttgcttgctgactacgggaatgaactacggatttgttacacgccgcttcatggtgccggaaaagaactcgttatgcgtggacttttggaaaatggattttcggaaacgaccattattgcagaacaaagcgaaccggatggggattttccgacagtgatttcgcctaatccggaagaagaaaatagtttcgacctagccaaaaagctggcaaaagaaatacaagccgatattattttggcaacagatcctgatgctgatagactgggagtggctgttttaaacaagcaagctacataccaaattttaacagggaatcagctaggagcgttacttttaaattatattttagaagcaaaaacaccggtaactggggcggatacgatgatcaacacgatagttactggggatttaggtgggaaaatcgcgtatgactttggaattaaccatatccaaacgctcactggttttaaattcatcggtgagaaaatagctgaaatggaaggcacggaaaaaaatttcctatttggatatgaggaaagttatggttatttaatcgcaccctttgttcgcgataaagatgcagtgcaggcagcattacttacagcagaaatggcgcttttctataaaaaagaaggaacaacacttcttggaaagctaaccaatttatttgaaaaatttggctaccataaagaatatttgcacacgataacattagacgatagcgatggaataactaaaatgattcaagtgatagacgctttgcgcaaagagccaattttcatgccggaaattactgtggtagaagactttcttactagtaaacggaccaactttgtgacaatggaagtaaccaatatagagctcccaaaagaaaacgttttaaaattctacttaatggatagctcatggtttgcaatacgtccttctggaacggaaccgaaatgcaaaatctattttcaaacaagcggtgaaacggaagaaattgcgacaaaagccatgaatgagttgagaaaacgcgtattagctgtatgggactaataaaaagctggaaatcatttttggatgattttcagcttttttaaaatttaaaataactaaaaacagctgataaacgtacattggaagtgaattaactttttttattcgataatagcaaggaaagataagcttttgacgttgaaaagaaataattagtgtgttatgatgatagatggaagtttattaggtttatatttagcctagtgattaatgagggcttttttatttgatgcgttagaactgctataatggcagagaaaatttctgatgccgtgaatcattttgcttggtgcgcccaggcttttctattgcagaaaaatgaaaatgaaagatagcagttttcataaaaacaactgcaaatgaacagacaaacaatcgtaataagcgtattgtgatgaattataaaagtagctctcctaccaaactttaaacaggtaaaggagaaatgacattgacaaaattttcggagttcggactggacgaaaaaattgtaaaatcagtaaatcggatggggtttgaagaagcaacaccaatccaagaaaagacaattccactaggattagaaggtaaagacttaatcgggcaagcacaaacaggtactggtaaaacagccgcttttggtcttccaatgattcacaaaattgaccaaaagagtaacaacgtacaagctttaattattgctccaacacgtgaacttgcaatccaagtttcagaagagctttataaacttagctatgataaacatgtacgtgtgctagcggtttacggtggtagtgatatcagccgtcaaatccgttcacttaagaaaaacccacaaatcgtagttggtacgccaggacgtattttggatcatattaaccgtcgcacactgaaactagatcacgtggaaacacttgtactagatgaagcagacgaaatgctaaacatgggcttcattgatgatatcgaaactattctaaaagaagtaccagcagaacgtcaaactttactattttctgcaacaatgcctgatccaattcgccgtatcggtgaacgtttcatgcatagcccagaacttattcgtattaaagcaaaagaaatgactgcactattaatcgaacaattcttcgtaaaagtgcatgaaaaagaaaaatttgacgtattatctcgtttattagatgttcaagcaccagaattagcaattgtttttggtcgtacaaaacgtcgtgtagacgaactatctcgcgcgcttgatatgcgtggttacgtggctgaaggtatccacggtgacttaacgcaagcaaaacgtatgagcgtactacgcaaatttaaagaaggaaaaattgatgttctagttgcaacagacgtagcagcacgtggacttgatatttccggtgtaacacatgtatataactatgatattccacaagatccagaaagctatgttcaccgtattggtcgtactggtcgtgctggtaaagaaggtatggcgattacattcgtacaacctcgtgaaatgggttatttacgtattgtggaagaaactacgaaaaaacgtatgcaaccacttcaagctcctacatgggacgaagcatttgcaggccaattacgcgtagcaactgaaaaaattcaagaagcaattacagaagaaaacttagctgactacaaaacgtttgctaacgaacttcttgaaaaatacgatgcaactgacatcgcagcagcaatgcttaaaatgttagcgaaagaaccagataaaactcctgtccatattactgaagagcgtccattaccatcccgtggtggcggtggctacaaaggtaaaaatggtaaaggcggcaaaggtggcggctatcgcggcggaagcggcaaaggcggaagctaccgtgatcgtaacaacagcggtaaaggtcgtcgtagcggcggcggttccggtggtggaagcggctctggcggtggcggcaatcgtgatcgtcgtggcggcggagaacaacgcagcggcggcaacaaaggcaactactcacaaaaatctaaataagattattagacaaatagttaccatatagatagactgtagataaagaagattttaactttatctacagtctattttttataaatgctagtgattaaacgatttcattgatacgggagtgtggtgctagttatgaagataaataaaattatcgaatatattgtagtagcaatcatcgttttggggtggacttacttcattgtcattaaagaaattctccctaaaaatataggatttatttcattagtaattctatcaatagttctttattttgtaggtaaatggttgaatggaaaacatagcacataaaaaaacggccatactctaagtagccgtttttttatgtgcaataagtcatttacattaacttccaaatatgagaaaatagcatgttggcaaaattgccacacgtggttcattcataccatcccacgtaaaaaaactaggaggaaaaataatgaaaatgaaaattttgacggtgaatgcaattatcgctgcactgtatgtagtgctcggaatgattgtcgcgcccattgggtttatggcattacaatttagaataccagaaatctttaaccacctaatcgtttttaataaaaaatacttttggggtattatcgtaggcgtttttattacgaatttgttcttttccggattaggttggattgatttagtttttggcgtagcacaatcggctatctcgcttttactaatgattggcatttctaaatacgttaaaggaattattccgcggatgattattaatacgattctcttctctgtaacgatggcaattatcgcatgggagctagtaatcgtttttgacttacctttcctaattacttgggcaacaacagctgcaagtgaattcattgtgatgggcgtcgggattccgctaatgtatctattaaataaacggttgaatttccgtaaaatgattgattaaatgagagcgtctaagggaacttaggctctttttatttttgtaaaaagcgagctgcctcctgtatcaattcaactaattgaccattcgtatagtctttattcgattgctgaatttctgccgctaaacttaaaatcattctagcaaaacaattaggaataaagttactatctgaaaaggaaatttcttttaacaaactaattcgaagtatttctccagataccacatctaaaaaaatattttcagcgcggctccaaaaaattgcttgaaataaaagcgggtttttttggatggagcggaggattaagcgttggatattttcttttgttaaaataatttggtcgaattccaaagagaagtattgcatggttcgtaaaatctggacttcaataatttgaataatctcttcatgatgacggtaaaaagtggctcgtgatatttgggcttgttcacataaatcttttattgatattgattcaaaagttctaccttccagataaaacctctccaaaaccgtatatagtttggtttgtgttttttgtgtacgtagatcaacattcaacggttgatgaacttttatatagttattcataaaaactctcctttttatgatacataattgttattagtgtatcgaaatgtggctattttagcaactcaaaaaggggtattgtttacttaaggaggaatgaacatgaaaattataacaatagaagaacattttgaatccgaagtaattacgaatgaaatcaataaagtcactggaaatttagtaagtggacaggttaatccggaaatgtttcagtatatgcaaaaggaacttccatcagcggcggaaatgcaagatacggaaaaacgattaggctttatggaccaacatggtattgatatgcaagtactctcttatggaaatagttctccgcaaaacttagatccaaaaatttcggtatctctgtgtaagcgagcaaatgatgaactagcgaaggtgattcaacaaaatcctacgcgattttccggttttgctgtcttaccagtaggctcaccagaagatgctgctattgaattaaaaagagccgtagaagaactaggtttcaaaggcgcacttgtgaaagggcagtttgaaaataaatattttgataatagcttttattatccgattttcgaaatggcagaaaaactagatgtaccgatttcgttccatccatcgtttatcccagaaactattacagaacaatattttgccagtgatgcttggtctgatgtagtcacgggggtattttcatctgctggttttggctggcatatggatgtgggtattcaagtcgtgcggatgattctttcgggtatttttgataaattaccaaatttaaaaatcattacagggcatttaggtgaaatggtgccaatgtttttagaaagaatggacgatacactcggtcactggacaacgcttgaacacaaaatttctgattattaccggacaaatgtgtacattacaccaagtggtttattatatcgaaacgaatggaaatttttattaaatgaattagatgaaaatcatctcatttatgcgctagattatccttttgtaaaaccagaaaatgctggaactttcctagatatgcttgatttaacggatgaagtgaaagcaaaaattgctcataaaaacgcagagaaattattacatttataaaaggtggaattcaaaatgactttatcaaaagaacaaatcaaagcaacgaaaagtgaatttgcggagaatttggcgcttgcggatttaacgattgtcgaagtagcaaaagaactaaatacaagccaagtaaaaatagaacggatttttaatctaaagcaacgttctttaaatgatggttggattttgcggaattacttacttagaaaggttacggaagtagggaagacaccagttccgtttacagcgctcagtggggattatcatggatattggtttttagatggagaagaaattgattcagggatattaagtaaaggaaatcattaaaaatagccacccaagaggtggttatttttctattaatctcgtttcaacaaaacaatatcctcattcttcgtcagcaataaatctacatgattctcgccccataagcaaagtttgttcaaaatctccgacaacgattcgccgtattcgctcaaagaatactccacttttggtggaatttgctcgtaaactttacggataataacgccggatttttcgagctcgcgcaattgttgtgtgagcattttttgtgtgatgttggggatgagtcgttttaattcgccagttcgttttttgccttcgcgtaaatggcaaaggatgactggtttccatttgccgccaataacttctagtgtagcttcgacgccgatattatatactttagtcatcaaaatcctcctataggcactttttagtatctatatgacttttaagtaccttcttgttattctgtacggtatataagatactgtataacagaacgaaacaatttgcaattttttagggggaaacaatgtggatatgaaaaaagtgaatcctaatttgacacttttagcgctagcaattagtgcgtttgggattggttcaacagaatttattagtgtggggctacttccactgatttcttctagtatgggtgtgtcgattagcacggctggtttgacagtatcgatttatgcgcttggtgtaatggtcggagcgccggttttaacaaccgtgacggcgaagatgaatcgtaaaaatctgttattattagtaatgctcgtgtttctaataggtaatcttgtctctgcatttgctgtaagttttggaatgctccttactgggcgcgtagttgcggcgtttgcgcacggggtgtttatgtcgattgcttctgttatcgcagccgatgtggttcatccgagtaaacgggctagtgcaattgcggtgatgtttacagggctgactgtggcgactgtgacaggggtaccacttgggacgtttatcggtcaactatttggctggcggatgtcattcctgtttattgttgcgattggtgtgatagcaattattgctaattttttccttgtgccgaaaaacttatctaatggaaaaagtatttcgtttaaatcgattgggcaattgttagttaataaaaaaatcgtgatggtgttactcatgacggcgtttggttatggtggtacttttgtggtttatacgtatttatcgccgatgtttagcggaatgggctattcgacaagtatgatagttattttactgattgtttatggtgtgatggttgcgattgggaatacgattggtgggcattttgcgaatgagcgtcctgccaaagcacttttcattatgtttagcttacaaggtgtgacgttgttgttgcttcaattcacttcaggaaatgccattttaggtttaatgactattatgctaatgggatttttcgcgtttatgaatgtgtctggtttgcaactttatgtggtgcaattagcagaacggtatttgccagaaacggttagcatggcttctgcgcttaatatttctgcgtttaatattggaatcgcactcggagcatttatcggtggattagtagcagaatatattggtttaagttatacaccaattgttggatttttgatggttttcatcgcaattattttaactttctatatgaaaaaagataaatagttcaaataataggccttttacagtgaatgtagaaggcttttttggtgctttcagtagctccgacctattccggcaaggtttttttccagttatagtaaaatggatagtttttttgtccctacgtatctgacaaaaatagctatatagcttattgtaagccctatcatgaaaatgataaattgaatttagaaagaggagtgatacctgatgaaactaaatcagcagtgtattcaaattttagattttcttatggagcaggaagattttaaaaatattggttatatttctaacgcgcttggttgttcggagcgaagtgttcgttatagtttggaaaaaatcgatatttttctccatgagcaaacattaccagctcttatcagacatacaaggaaaggggtgctacttccggaaaagaatatcgtaaacccggttgtgcgtaaattcaagcaacaaatcacaccgaaaaaataccgttacagccaagaagaagtacaacaatttttactgctaaaactgcttttaagtgaagaagtgctcccggttacttattttgaagaagtcctgtttatttcaagatcctctgtgctaaatcatctacgtgcgattgaaggagaactttttttaaataatttagatttatctcaccaaccgaggcatggttttctagtgactggaaatttaattacgaaaacatcactttttgctagaagtttcttgcgttttattaatatccgcgaattttatcagtttttagattcggaaaatagcttatctaaaaagggcgagttatttttctataatctttttgaattggagattttgcaggaagtgaatcgtgaggcgcattcggtggaggagaatatgacgcgtgcaatggatgagcaattatatttaacgttaatcgcgattttactgaaacagcatgaggcaaaagtggattttcagtttacggcagattttgtggcagtcgatgagctcgataaggcgctagaaataattattgggtcactaaaacagtatcaatatggacgcgaagatgaggcggttattgaagcgtttgtaacaggtatttgcgaaaaaatgggtgaaatttatcaagtggattttgtgcatggggatacggatttttatacacaaatcaaagcgcatattaaattaatgattcggcgcgttcgggctggagtcattatcgaaaatcctatttttaatgaatttatgcgagataatcgggaaatttttatgcgtgtgaaggaaagcttggaagcgttaaagccgctactcccaatttcagttagctctcaggaaatttcatttttagcgatatactttgcttccgaggtacaacgcaataaacaaaccgttgaaatgaaaccaaatttactaattatttgcccagaaggtgtcgcggtttcaaaaatgattgcaattcagttaaagcgaatgtttgagtttgagtcgattcaaacgattgggcttagaaagttcaaacgcgcgatgatgaatgattttgattttgtgattagcacagtggatttgcctgatatgcaagacacgaaagtactccgaattcacagctatttgcaaaaagaggatatggaattactgcaaaaacatttacggatgaaactcgtcaaaagtgataaacagattattaataagtttagcaagattttagcgattattggcgaaaatacgcaaattactaatttaagtaaattagaattcgatttattggaagcgcttatatcggatgaaggagaaacaccaaaaaggcttattccaacatttgaatttacagaagaagctattgttatggaagaaacatgtcctacttggcgccaagcaattaaacttgggaccaaacgtatggagcagttaaaagtcattgaaccaagttaccacgaaaaaattatccacaatttaaaagtatatgggccgtatatggtcattgcaccaggcgtggtaatagcgcatgcaggggcaagtgatggagttttgatggatggtattggagtgacgatcattgaggatggcatcatgtttttcgataggtacgaggagccggttcatgtcattttcacattagctttaaaaacaaaagaagcgcatttaatcgtggaacaattaatgaaattagcgctgaatgaagaaaaaatgcaaaaaattaaaatggctagctcaaagcgtgatatttatcattacgttaagtcagctatctttgaatgaaagagggtttcataatggacatagaaaaaatatcgttttcattaatttcactggcgggggattcgttttctaaattaattgaagcactacaggctgcaaaagaatcagattcagaactagttgaacaacttttaaaagaagcagatgacttaatgattgaagcacacaaggtacaaacggaaatgctgattcaagaaacaagaggggaacaagcaaatttttccgtcttactcgtgcatgcgcaagatactctaatgaataccatcttagcatcaactttaattcgcgaaatgattgaaatgcatcaagagattaaaacattaagaaaagaggaggaaaagtaaatggaaatcaatcaattacatgtacttttagtttgtaacttaggcgcatctacaggggtaatggttacaaaaatgaaggaaattgcccaaaatagtgaaaaattaacaaacaccgatgtaaaaatcgaagcgcatccagcaggagaattacgcgagcatattgaagactttgacgttattttagtcggtcctcaaatcaaacatcaactcaaacatttaagtgaaattgcggcggaatataataaaccaatccaagtcatcgatacgaaagattacggcactgttaatggcgcaaacattttaaaagacgcaattattcttaaactgaacaaataaaaaagtggagggaaacaacatgtcgagtaaaaacaaacaatcttttatgaaccgttttattgcttttatggagaaatattttgagcctgtcgcagctagaattgaaaaacaacgccatatttcctcaataaaaaatgggatgattgctttgatctcggttttaattattggatcattttcgctgattatttcagcaatcgggaatatgtttccagcaggttctgttgtcaaagaattctttgttcaaaacgcagcagcacttaacttaccgtttcaatttacgtttggattactatcgatttatgcagctataacgatttcctacagccacgcaaaacaaatgaaagtgcctgtgttacatagcgtgatggctgctgttatggtgacactcatcctcaatacgaaaatggttgacggggttcttaatacagaatttctggattcaagaggactatttatcgccatttttgcagcactgatttctgtagaacttatcggcttatttattagaaaaaatattacgattcgaattaaagggttaccagcggggattgcgactacttttgaagcaatcattccattagtagtactgctgttcagtgctgttggactcagtattttaatgcaaagtgtcactagcggtcaaatcattccggaagcctttacgacgatgctagctccggcgattaatagtatcgatacgccttatgcggttttccttatttgtttccttgaaatgctattctggtttatcggtctgaatggttatgcgattttgattggttttgtacttccatttatgacgcaatatttaggagcgaacgcggctgcatatgcggcaggagaaccaatcccgcatgtatttgcgccaaacttctgggattacttcatgggcttctctggttctggtattacaggtgcattagttatccttgcgctatttagtaaatcaagagaattgaaggcggtcggaaaagtgtccgttgttccagcaattttcacaatttctgaaccagttgtatttggtttaccgatctgttttaatccgtatttatttattccattcgtacttggcacgccaattttggcagtagggcaatggtttgtgttccactttggttgggttcgtccgccgattgcgaatgttggggggacaccgattcctctcgcgcagtatttggcgacaatggattggcgcgcgattattttaatcatcttcgttcttgcggcagccgtttgtatgtactacccgttctttaaaatgtatgagaagagtttgattaaagaagaagaagttgtatcagaacgtcaagctgcccacgacgcgctagacttggatttctaataagaaaggtggatttaaaaatgaaactaattattaacgaaaatgaacaactcgtggcggaaacagtgagccgaagaatcattgaattggtaaaagaaaaaccagcaagcttaatttgtatcgctggtggagatacacctttattaaccatagaagcacttattaaagcaaatcaagcgggcgaagtagactttagtaacacgcaatttgttggtttggatgaatgggttggccttggacgcgaaacaaaaggtagctgtatccaaacactctatgatgcatttttcgaccgtttgaaaaatgtttctagtgaacaaatttgctttttcgatgggaaagcaacaagtttaacggatgaatgcgctcgtgtagacaagtttatcgacgatcgtggcggaatggattttattttgctggggattggactaaatgggcatattggcttcaacgagccatttgtgccagtagatgtgaattgccatgtcgtggagctggacgatgtaacgaaacgtgtcatgagtaaatattttgatacagatttgccactaacacacggaatttctcttggtatgcaacaaattttagcggctaaagaaatatttttagtagcaactggcgagaaaaaaatcgatatcgtgaaacaagtagtggaaaaagaaccgacagtagcgattcctgcaactctcgtaaaagattcaaatacaatgcttgtagtcgataaaattgccgcgagtggggtggaagcataatggaaaagattatcgttaacggtagaaaaaatggacaaaaaatcgagatagcttgttctaatttagtgatgggtgcaggagatttcttacgtgcagataatatggattttgcgggtccagtactagatcaatatttcgaaatgggtggaaatatttttgatacggcgcgccattatcgccatagtgaaaaagcgattggcgcttggatgaatatgcgaggaaatcgggatagtgtcattatccaaacgaaaggtggacatccagtccgggaagcaagcgacgtgccgcgtgttactccggaagcaattcacgaagatatttcggttagtttagatacgttacaaacagatcatgttgaattattcgcacttcatcgcgacaatccagacgtagaagtgggttctattatggaggcgatgcataaagaagtggaagctggacgcgtttacgctattgggctctcaaactgggagctctcgcgcattatcgaagcgaatgaatatgcagtgaaccatggattgacaccactaagctttaacagccctaattttagtttagcaaaagtgaatcgaccacgctgggaaaattgtgtttcggcgaatgaagagatgattcgctggcatgaggcgacgaatttgccactattttcttggtcatcacaagcaggcggatttttctctggtagattttctgaggaagacacgagcgatacggaaatggtcgaagtttattatagtgaggcaaactgggaaagatacagtcgtgccaagcaactagctaaccaaaaaggttgcacaccaattcaaatttcgcttgcctatgtattaacgcaatcattcccgacagccgctgtcatcggtccagaaaatactactgaacttcaatcttccgttgcagcagcagggattaaattaacagcgtctgaggttgattggctggatttaaaggcataaggaaaggcggagaaacaatgaatataaaagaaaaactagcagtccaactttattctgtacgaaaagaaatggagcgcgatttagaaggtacgctccggaaaatccatgaaatcggctttcattacgtgcaactcgatggtatgcgtggcaatgattctagagaggtacgttgtttactacaaaaatatgagttaaaagtgattggcatgcacatcaagcatgatcgttttatgaacgatttggatggcatcattgaagaagcttatttctttgattgtaaaactatttttgacaaatatattgaagaagaggaccaaacgacagcgggctacatggcaacaaaagcggcgttaattaatgcggcggaaaagctacatccactcggttttcgcattggtcttcacaatccggagtatgatttcaatgaatgcattcatggtcgcagagtgatggattatattaccgacccagttgacggcatttgtatttatgcagaacctgatacttactggattcgtgcggctggacatgatgaaacagaatatattaagcgctacagcggccgcgcgccgattgtgcatatgaaagattttttgagcggttttgagctagaagatatggataataatttagtcgaaataggacaaggtgaagtagattttcgcgctatcattgaatggggcgaagtaaacggagtcgagtactattgcattgagcaagatagatccaaaagagatatgttcgaaacattagaagcaagttatcagtatttattacagttgtaaatagaaaaacgtcaggcttgttctggcgtttttttgtgcacaaaatctttgtacggtttttaacaagcaagttgtgggaactataaagatagatgttttaagggggaatgaaacaaaatgaaaaaaagatggctggtttttgcaattatatgtttaattatcactggatttttaagtccaaaagcagaagctgcaacagattacgggagcagtttttttactaatgtatcattacaaaatcaaaacggggaacaagcaacgaattttaaagaaaatagtaaagtgcgagtggcgtatgattttgttattacacagccagttgcaagcggggaaacaatgacgcttactattcctgatcagctaaaattaattaattatggcggatttcctctcatggattcgcaaggaaacactatcgcaaatgcaactattgatcaagtaacgggaacgattacattaacttttaccgactacgtaaatacacatacagatttaagtggtagccttttttataacgcaacttttaacagcaaaaatattcaaacagatcaagtaaatccaatcgcatttccggtaaaaaatactactcaaacagtaactccatatattagtaaggtgaattcgggcggtggcacaggctcaccaacaattgtttttaaacaaggtcgaatggatgataaagacttaagcattttacattggaccgttactttaaataatgcgctgacacctattgataatgctgtctatacggatacgctaggttcagggcaaaatctgcttggaagcgcaacaatcaaataccgagatgccaataaaaaagtgatagcgactaatattcaacctattgcgctggatgcggatcgcaattttgaattatctattggcgcgttaaataatcaatctgtcgtcattacttatgatacgaaaattacgacaaaacaaaaaagctatacaaataaagcgacactatccggtgataacctagatgctgtttcgagaaatgcgacagtcaatgattacggtagcggtggacaaggaacaggaacaccgccagcccccccggttaaagaagaaccaccatttattccggctgaaaagcaaccgattgaaaaaacagtcgaaacagattttggtccacttgaaatcgttaaagattccgaacaaaatggcaaaattaaagtcatttataaagtgaaagatggcgatacattacctggagtagctaataagtttgatgtctccgttgcagaaattaaagactggaacaatctcacatcggatactttacaagccggtcaaaaattacaattaactattgaaaaaacgctcttatcaaaaattaccgtgccacctgtgcaaaaagtgactagcacaacaagggtagacggtgtcgtaaaagcaacaggggttttacctcatactggggattcgaacccatttatcccatttgtaacaggcctaagcttaatagcgcttggttttacatttggacgcaaaagttaaagaaaaggaagcactcattttatttagagtgcttccttttttattataataagtgacctttttttcgatgcgtcacttgttggtttttagaatgatcatgaaacgatttagaatctttctttggttcctctggaaggttaatcgtgatggttttgctttcgctagtcccatctgccattgttgctgtgattgtcactaaattatttccaggttgcaaattagctaatgtaaattgatggttttcggtgctaccagcaattgattgcgtttgattatttgtttcggtggtaatcgatgcggcttcctctgttacaaacattaactctgcactatttttcgtcgtttcaatataaggattttgaatgggataaggtagaaacatgtccattaattcgcttgtggttgcagttgtataagtagttgctgttgtttctttttgcgcgtgggcaatctccggaagccagtttaaagttagcgacaaaagcgctattattaatagaacataaccttttttcttcatcattctcacctcttcttgttatattataaaaaagaaatatgaacaaactatgaataaaacatgatagatttaaaaaatcgctaccaatttagctgtttttaacgtaagataaaagaaaaaaaggagtagagcaatggaacttgataatttagaaaagaaattaccggagaaaattaaaacagtttggcggcaaacggagggaattgctgttcttgtttttctactttgttcggttgctgcggcgattattttgtattatacaggagcttcagtgtggtggagtgcgatcggttttggattaacggtactttatgctgcctttatttacttattcattattccgtttcgttttgcacgttggagctaccagattaaaccagacgaaatggaaattcagcacggcattatttttagaagtcgtgtcttaattccgatgattcgcattcaacacgtggaaacggagcaaggcccactacttagaagacaaaaactcgtttccttatcgattacaactgccgcaaaaacacataagattgaagcggtaaacgagtctgaatcagatgaacttagacatcatatccttgaacttgtgaaggtggcgaaagaagatgtttgaagaaagacgcctccatccgattgccctcattaaagaaattatcacgaacgtaaggcgcaatattgttcctatcgtcgtcggtttattttccgttttccgcgccattaatagtaacggctatttgccggactgggctgtatatttaatcattgtcatcgttatactgcttattttgactcccgcagtcttaaagtatataacctacaagtacaccctcgaagaccaagggattcgcatcaaatacggtttgattttccgaaaaaatacatacataccttacgaacgcatccaaaccgttcaaaagaaacaatggtttttctttatcccatttaatgtctgccaaattttaatcgaaacagctggtggcaacgggaaagcagaagccgatttagtcgctgtcccagttggagtagtagacgaattaaaagatttacgcgacggtaaaaagagagacatccaagaagccgtgccagaaaccgaggaaaccacagtagaagtggcagaagcaccagaaaaaacggtcatgctacaaacaaaacagcttattttaatggcagtaacatccggcggcgtttttgggactctccttatcgttctagcgttcatgcaacaattccgagaagtcattccgacagactggatggaagcccaagcagaagagttatggaaaatgggcattatcgtgctaattgtattaatcgtcttgattcttttagtattatggggaatatccatagtgacgacattgttcaagtatttccagttcaaattgatgaaataccccaattcacttgtcgtcgaaaaaggacttttagagcgaaatcatacaactatctcactttctcgtattcaaggaatcaccatcattgaatcaccactacgacaaatgctcggcttggtagcagtaaaagttacaactgccgggaactcaggtgatgaaaaactaaccggagacattttacttttgccaattatgaaaaaagcgttggccataaaaacgttaaaagaaatgctaccagattatttatttgaaatagaagaaatggaatgcgctccaaaggcaagtttgcgtagatttttgcagatttacttaatctggacaattatcccagccgctgtagcaagtatcctatttttcccgctcggcttaattagtattattttgccaattttagcagggataaaagcgatagccagctaccgcgcgaccggaatttttacagataagcacacgctccttgttcagtcgaggcctattttttccaagttaacccatattatccgcaaagagcgaattcaaggtttgagcttaagacaaagcatttggatggaaaaaggtgggtcaagacacttaaatgtttggctgaaatcaggtagtacaagcgccgaggcttatgttcgttatatcaatcaagacttggctatcaaggtttacaactggtacagcccatccaaaactacgaattaaaaaagaacatgccatttccaaaaatccgctgaacatagcgagtgcattttggaagatggctgttcttttattttttgttcaattacccggaaatctggtaaaatagatagaataaacgaaagagtagatagagaggattggttaagtagtgaaacatatagtcattatcggaggcggcttatcagggctcgcagcagcgtatgaactacaaaaaacacatccgaattatacgtgggaattagtagaaaaagacgaaaaactaggcgggaaatttgaaacggttaaacgtgacgggtttttaattgaaaaaggtccagattccttcttagctagaaaacctgctggtgtgggcttagtaaaagatttaggactcgaagataaactgattgcgaacgcgacaggaagatcttacatttaccaccaaaaagcgcttcatccgattccagaaggctctgtgatgggaattccgacagataaagaagcactgctagctagtacacttgtatccgaaattgggaaagctcgcgcacttcaagaaccaacaatggaacgaaataatcaagaacgagatcaagcacttggcgatttctttgaagcgcgattcggtaaagaattagtcaaaacaattatcgaaccacttttatcaggaatttatgccggggatatatacaaaatgagtttacgcgccacttttccacaattcgaacaaacagttaaaaaatatgggaatttgatggatggtttaaaagaaagtagcatgcaaacgacagggacaaaagccactattggtgcttttagaacattagaaggtgggctagatgctttgccaaaagctattgccgccgcacttccaaaagaaaatttgcatacagcaaaacaagcaacagaaattgtgaagaaaaataacgcttacgaaatttcttttgcagatggcgataaaatggaggcagatggcgtcattatcgctgccacacatgatgcgttaattcatttattagcagaaacaacgacagaaccattcgcgggacaaccgcttacgacccttgcgaccgtttcgttagcatataatgaacaagacgtaccgattttacctgatggaacaggctatctagttgccagaaccgcaccatataaaaccactgcttgtacatgggtgcagaaaaaatggccgcatatggtaccaaagaacaaaatgttactacgaggctttgttgggaaagcaggagaaacttggttagagcaagcaagcgatgaagcaatcgtctcagctgttttgagagattatgcggaaattatggaccttcacgccgcgccacttttttatgaagtaagccgaatgaaatccgcgatgcctcaatacttagttaatcaccaggaccgactaaaacaattgaaaaagaacatcaaaacagattacccaggtgttttttttgcaggaatgagctacgaaggtgtgggtattcctgattgcatcgcaggggctcaaacagccgctaaggaattagtagattacttggaagaggtgtaacatgattaaaggaattggtctagatatgattgatttagaacgtgtaaaacaagtcgtggaaaagaatccgcgctttatcgaacgtgttttaacagaaaaagaaattaagcaatttgaaaaatacgaaggtaatcgcaaaatcgaatttttagctgggcgttttgcagcaaaagaagcatatgctaaggcgaatggaactggttttggcaaacatttaagttttacggatgtcgaaattttgcaagtagaagatggtcgcccccatgttactttaccagtcaaatcaggcgaaaacgtttttgttagcatcacccacacagctagatcagccgcagctcaagtgataattgaaatttagaaaggaacgtgaacaatcatggtgacaggctggcatcgtcctacatggattgaaatagaccgcgcagcaattcgcgaaaatataaaaaatgaacaaaataaactcccggaaagtgtcgacttatgggcagtagtcaaagctaatgcatatggtcacggaattatcgaagttgctaggacggcgaaagaagctggagcaaaaggtttctgcgtagccattttagatgaggctctggctcttagagaagctggatttcaagatgactttattcttgtgcttggtgcaaccagaaaagaagatgctaatctggcagccaaaaaccacatttcacttactgtttttagagaagattggctagagaatctaacgctagaagcaacacttcgaattcatttaaaagtagatagcggtatggggcgtctcggtattcgtacgactgaagaagcacggcgaattgaagcaaccagtactaatgatcaccaattacaactggaaggtatctacacgcattttgcaacagccgaccagcttgaaactagttatttcgaacaacaactagctaagttccaaacaattttaacgagtttaaaaaatcgtccaacgtatgttcatacagccaattcggctgcttccttattacagccacaaatcgggtttgatgcgattcgctttggtatatcgatgtatggattgaccccttccacagaaatcaaaactagcttaccatttgaacttaagccagcacttgcgctctataccgaaatggttcatgtgaaagaactcgcaccaggggatagtgtcagctacggagcaacctacacagcaacagaacgagaatgggttgcaacgttaccaattggctatgcagacggattgattcgtcattacagcggttttcatgttttagtaggcggggaacttgccccaattatagggcgcgtttgtatggatcaaaccatcataaaactaccacgtgaatttcaaactggttcaaaagtaacgataattggcaaagatcatggtaacacgataacagcagatgatgccgctcaatatttagatacaattaattatgaggtaacttgtttgttaaatgagcgcatacctagaaaatacatccattagaaggtaatattcgtgctttttttagaagaagcgtttataatctaacatatgaaactttatagctatatataggacttaagggagtatatcagctagaactgtaatattcttaacaataaaatgcgaaataactcttttcttcaaggcgtgataatggtacgatatagttgttacttacaggtacgaggctttgggggtgtgacacgtgttagagaaagaaaatcggatgataatatccgtagaactgacacaggaaatgatacaagaactcgacgtagttgtagaaaaagaaaaaatggggcggagtgaagttataatggaagcaacgcaacagtttttacaagagaaaagggctcgcgaattaagagacgagatggaacgcggctatgcagagatggcgacaattaattttgctatcgcatgcgagtgtacccatgtcgaagcagaagcagaagacaggaatattagtattttaggaggttaatggctgatggtgaagcgtggtgacgtatactacgcggacctttcccccgtggtcggaagcgagcaagggggaatacggcctgttctcatcattcaaaatgatattggtaatagattcagtccaactgtgatcgtggcagcaataactgcaaaaattcaaaaagcaaaattgccaacgcacgtggaagctactcgtaaagatggctttgagaaagattctgtcattcttttagaacagattagaacgattgataaacagcgcctgacagataaaattacgcatttggacgaagatttaatggccaaggtaaacaaggcacttgaagtcagtctaggagtagtagaattttaatccatcctaaaaaaataacataaaatgatgaatgcagggcaaaagggtctgacgtaaaataattagtttaatacataatgaaatagttaactgctctgaagaaacagtaaggacatcagaaacctacaaacaacgcgtatcaacatactcgctaaatttgtttctaatgtcttttttaaaaggcagttaagcaaaccgcacaataagagagaaaattttgttaatagtggagaaaggttggaaaataactgatgtataaagattttgcaaacttcatccgtacaaataaagcagacttactgaatgactggatgaacgaaatggagaaacaatcagatcagctaatcaatgacattgcaaaagaagcaatgtacgaagaaactagcaaagaatttgtagatttaattgtttcgaatgttacagaaaacggttctaaattcaacgaaaaactagatgattttgcagaaaaagtggtccacctcggttggccaattcattttgttaccacgggcctacgtgtttttgggcttttagtatatacagcaatgagagatgaagatctattcttaaaaagagaagaaaaacctgaagatgatgcctattatcgctttgaaacatggctttcgtccatgtacaacaaagtggtcactgcctacgcggatacgtgggaaaagacagtttctatccaaaaaagtgctttacaggaattatctgcaccacttttaccaatatttgaaaaaatttctgtaatgccgttaattggaacgattgacacagaaagagccaagttaatcatagaaaacttactaataggtgttgtaaaaaatcggtcagaagtggttttgattgatattacgggagttcctgttgttgatacaatggttgcgcaccatattattcaagcgtccgaagcagttagacttgtcggctgtcaggcaatgcttgtaggtattagaccagaaatcgcgcaaacaatcgttaacttaggaattgaattagatcaaattatcactaccaacacaatgaaaaaaggcatggagcgtgcgctagccttgacgaacagagagatagtagaaaaagaggggtgaatactgtggggataccaatcttaaagttaggtgaatgtttattaatttctatccagagtgaattagatgatcatactgcggtagaattccaggaagatttgcttgcaaaaatccatgaaacgtcggccagaggagtagtcattgatataacttctatcgattttattgattcatttattgcaaaaattcttggagatgtagtaagtatgtctaaactaatgggtgcaaaagtggttgtaactgggatacagccagcagttgcgattacactaattgaactcggaattacgtttagcggagtactttcggcgatggaccttgaaagtggtctggaaaaacttaaacaggaattgggggaatgaacatgacattccaatcctgtgtaaagataattaatgaatgggatattgtagctgcaaggcaactaggtagaaaaatatccaaagaaattggctttggaaccgttgaccaagcaagaattacaactgccatcagtgaattagctagaaatattttcctttatgctggacgaggagaaatctgtatcgaaaaagtaagtgaatctggcaaacaaggtatgattattgttgccaaagacaaaggtccaggtattgtagacataagaaaagtaatgcaagatggttatacaacatcaggtggtcttggagcaggtcttccaggagtcaaacgtttaatggacagttttgatattgaatccagtattgaaggcgattctaaaggaacggtaattacaacaacgaaatgggttcggtaaggagagctagaaaaaaatggaaaaagcttttgagggaaaataccgtgatattcttattcaatatttagaacatcaagatgaagaaattctttatacttgcgaaaaattatccagagaagctatggaagaacgagtatcaccagaagaaattgtccatttacatcgctcggttcttgaactatacggaaaagagttgccggattttgtccgattatcatttgatgtactacttgaaataatggtaggctacggcttggcttatatggaacatcttagtctaagaaccgagcaaaaagaattacgtagtgaaattgctcaagcggaagatatgcaaaaaacgttaatgaaaacagaggtaccggaacacgatgaacttgattttggggttatcagtgtcgcagccagacaaatgagcggtgattactatagctttacagaagaaggcgacaaacaaattggtatcgctcttgctgatgttattggtaaaggaattccagccgcatttagtatttccatgataaaatacgcactagctggaatgacaggggacgacagaaaaccatctattgtactcgaatcattaaaccaagtagcggaagaaaatattaacgacaacatgtttatcacgatgttttacgggctctatcacgaagatacacatttgtttgaatatggttcagcaggacatgagctgggcttatattaccagcataaagaaaacagcttttctgatttatacgccaaaggcttaccactgggtgtggataaaaatgctatctaccgtcaatttgataagaaaattgaagtgggggatgctgtatttattatgtcagatggtgtaacagaaacaagaacagccaatggctttattgaacgtgaagagttaacagaaattatagcagcgcatatttcattatctgctgaaaaaatggttcatgcaatttatgatcaattagttaaaatgcaaaactttgagttgcatgatgactttacgcttatttgtattaagcgaactaaataagaagaagtgaagacgtacctcattctttagagagcatttactggtgagtaaacgtatttaaagagtggagcgtttttatttttgaatgttttaattttatttgttagggtaaaatcgacagtatacttaaaattagatggggtgaagtgatgaatattagtatagaaataaaagaacgtgatactgaccacatagacatatttgttgctggggagatcgatgcttatacagcgccaaaggtaaaagaagcattagaagtatatcaagttaaagagggtattgtacttcggatcgatttaacagaagtgagttacatggatagcaccggattaggcgtatttgtaggagctttcaaaagcttacgtcaacgccaaagtgaacttgtcttgtttggtttaagcgaccgacttttccgattgtttgaaatcacaggattgtcagatatcatcgaaatcaaaaatgtagagggtgaaatgaatggcaacaatgcatgacaaaattacattacaacttcctgccaagcctgaatatgtaagtttaggtagactttcattatcaggaattgcaagtcgcgcaggattttcttatgaagcaattgaagatttgaaaatagctgtaagtgaagccatcactaattccgtaaagcatgcatttaaaggggaagaagatggcgaaatcacagtcgaatatcttatttatgaagataagctagaagttcgtgtttccgataacggcacaagcttcgacttagaaacccgtaaacaagaaattggcccatatgatgtgggcgaggatgcggagatgatgcgtatcggtgggctaggtttatttttaattgaaacattaatggatgacgtgaaactttattatgatgaaggggtttctgtcgtaatgaccaaatatattaatgaaaagcaggtggaggagaatgccaaaagtatctcaacctgataaagaggcgaaagaaaaagtctatatttggattgccgcttaccaagaaaatggcgatcaagacgcccaatataatttagttgttcattacaaaaacctagtagagtccatcgcccgaaaatattcccaaggtaaatcttttcatgaagatttagttcaagttgggaatattggtttacttggagctattagaagatatgatgcaacgtttggaaaaagctttgaagcatttgctgtgccaacaattgttggtgaaatcaaacggtttttacgtgataaaacatggagtgtccatgtgccgcgccgaatcaaagagttaggtccgaaaatcaaaaatgccgtagaagagctaacgagagaacttcaaagctcgccgcaaattagcgacattgctgattttattggtgtcacggaagaagaagttttagaagcaatggaaatgggaaaaagctaccaagcactttctgtagatcattcgattgaagctgattcggatggaagtacgattacgttacttgatgttgttggtggtacggatgatggatttgaacgtgtgaatcaacgtatgctcttagagaaagttctccctgttttagatgagcgagaacagaagattttgcaatatacatttattgaaaatcgcagtcaaaaagaaacgggtgaactactcgatatatcacaaatgcatgtgtctagaatccaacgtcaagctattaaaaaacttcgagaggcgttgcagaatgaggaagtggagtaaatgaacaaggcagttgaatcaaataatttatttgtatttcaacgttctaaagcattacaacaatactgcggggatgtttattatacccatgaagacgaaaatggttttctgtatgttctttctgatggacttggaagtgggctcgaagctaatagagcggccaaagcgactgttgacgccataaaagaagatattcatgcagatattactgatatgcttgaaaaagcgaaccaggctgtttcagggcttcgtggtgctgcgatagctattattaaaggtgactacttaacgaagacactttattatactggtatgggtaatattcgtttttatatgattgggattgaagataagcttatttttccgctttcaggctctggatttttgtccggtcgaaaacagaaatatcggttgcaatcgtttaaatataaaccagacagtaagtttttaatgcattcagatggacttgttctttctcgcgttagaaaaagcctagaatcaccactttgtgtagtgaaaaccgggcatttaatcgagcgtaatatattagatattccaacagatgatgtaacttttatggttgggaaatttccggaataaccataacaccttttaaactagcgatggtttgaaaggtgtttttttcagattgggtgtgagaacaggggctatttatggtatattagaatagagcgctagttttttatacttaatcatgtgataattgtcacttagtaagcgtgaagccaaattgctttgcgtttttttcgcgcggattaaaatacaaataagagagaaggagcaaattgaagaaagttttgttgaatagtgtaaaaggttatacgtgggcgaggtttaggaaagacttgcttgcgggtattatcgtgggcattattgctttaccactagcgatgtcatttgcgattgcatcaggtgtaagtccggaatatgggatttattcaagttttgtagcgggaataattgtttctatttttggtggttcgaaatttcaaattgctggaccgactggtgcatttattccagttttactaggaatcgtattaacttatggttaccaagatttacttgttgccggaatgatggcaggggttttactttgcctaatgggaatttttaaaattggaacattaattaaatttataccgcgtccagtaactatcggattcacagctgggattgctgtcactatttttatggggcaagtgggtaatttcctaggattaactggaatggagaaacatgaatcatttgtagcgaatatgaaagagatctggttgcatcttgattcatggaatttctatagtgtgctcatttcatgtatttgtatgcttgtcttatttatttttcctaaaattttaccgagaattccagcaccacttattggacttgtggttacgacggcgattgctatgctgtttttcccggatgcgcttccgacaattggatcagcttatggaaatattccgagtacttttcctccatttgaatttccagatatgacttttgcgaatatgagtaaattgattggaccggcttttgttatcgcgatgcttggcggaattgaatcgcttctttcggcggtggtggcagatgggatgacgaatacaaaacataatagtaatcgagagctaattgggcagggtatcgcaaatattgtaacgccaatgttcggtgggattccggcaacaggagctatcgcaagaacggcaaccaatattaataatggcgcgactagccgtgtctcaggtgttatccacggggtttttgttttactcactttactagtacttgcaccagtagctgtcaatatcccaattgcagcaatggcaccgattttaatgttagttgcttggaatatgagcgaacgaaaaaccttccaacacatcattaagttgaaatcgggcgatactttagtgctggttattacttttttattaacggtatttgcaagcttaactgtggcagtcgaagttggtttactgctggcagtggtgcttttcgctaaacaaatgggaagttcaatgcagattgaagaaatcgaaccagaaggcgccgaaatcgctcctcatttacacgaaaaaattagtatttttacaattcgtggtccgcttttctttggcgcagcacagatttttcaacaaaatattataaaagcaattcatgttaaaccaaaataccttatattgcggatggggaaagtgccaattattgacgctacagcagaaggctatttccaccaaattgaaaaagaattttcgaagcaaggcggtcaaattttaattaccgggctaacggataaagcgaaagaaagtttgaaaggtagcggactttacgaccgaattggcgaagaacacttcttttcccataccgaagatgcgattcattatgcggaaaatgctttaaataagtgaggcgggtagcttttgtcagttgaaacgtaattatgttacacttagtagataatgaaataaatggaggctatcaagtatggaacaaatgcaagataaaataatgaaattagtccaaaaatcgctaacgtataaaccagcgcaaattaatgctgttatcaaattaatggaagaaggtaacacggttccgttcatcgcgcgttaccgtaaagaaatgactggtagcttagatgaagtagaaatccgtgatattgaagaaacatttgaatatgtaacgaaattagaaaaccgtaaagaagaaatcattcgcttaatagatgaacaaggaaaattaacagatgaactgagagcggcaatcgtcaaagctgaaaaacaccaagcgcttgaagacttatatcgtccgtataaacaaaagaaacgcacgaaagcaacaatcgccaaagaaaaaggcttagaaccactggctgaatggcttatgagctttccaagcaatgccgatccactgacagaagctgcaaactacatttcagaagaaaaagaagtggaatcagcagaagctgcattactcggcgcgcatgaaattattgccgaacaaatcagtgatgagcctagtttccgtgaatggattcgtaactttacacgcaaattcgggatgattgaatccagagcgaaaaacgccgaagcagacgaaaaaggcgtgtacgaaatgtattatgaatttaacgaaatgattggaaaagtagctagtcaccgtattcttgcttttaaccgcggggaaaaagaagatattttacgtgtacaagtccaagtggatacaacaaaaatcttccaatatttatttgaaaaagttatccaaaatcgcaattctgcaactcgtccttatgtagaagaagctattttagatgcctataaacgctttattggtccagcaattgaacgtgaaattcgcggcgaactaacagacaaaggtgaagaacaagccatccacattttctccgagaacttgcgcaaattgctattacaaccacctttaaaagggaaaatcatccttggggtcgatccggcttttagaacaggttgtaaattctctgtgttagatcaaacggggaaagtgcttgaaatcggtgttgtttacccacatacggctaaagcacgtcgcccagaagcgaaacaaaaaattgcagaaattttatcaacatatcaagtagaagttatcgcgattggtaacggaacggcatcacgtgaaacagagcaatttattgtggaagtgattcgtgaatcgaactccaatgcttattattgtattgtaaatgaagctggtgcgagtgtgtattccgcgagtgaaacagctcgcgaggagttcccagattatcaagtagaagaacgtagcgcagtttcaattggacgccgtttgcaagatccactagcagaacttgtgaaaatcgatccgaaatctgtcggtgtaggacaatatcaacatgacgtagcacaaaaacgtttaaatgaaacactaactttcgtcgttgaaacggccgtcaaccaagtcggtgtcaacgtaaatacagcatccgcctctcttttacaatatgttgctggtttgaataaaacagttgcaaataatatccgtaaatatcgcgaggaaaatggttcgtttgcttctcgtaaagagttgaaaaaagttcctcgtctaggcgcgaaatcatatgaacaaagtatcggcttcttacgtattttagaaggcgaaaacccgcttgataaaacagcgattcaccctgaaagttataaagcggcagaacaaattgttaaagcagctggttttggcttaaaagatatcggcagcgaagatttaaaagcggcattacaagcgcttagtatcccagaagaagcagagaaattaaccattggtaaagaaaccatgcgcgatatcattgataacttaattgctcctggtcgcgaccttcgtgatgaacttccagcaccacttttaaaacaagatgttatttcgatggaagatttaaaacaaggaatggaattacaaggaacagttcgtaatgtagttgactttggcgcttttgttgacattggtgtgaaacaagacggccttgtgcatatttcaaaactaagtaattcatttgttaaaaacccgatggatgtcgtttcagtaggagacgttgtaacggtttgggtcgatgaagtggatacaaagaaaaatcgtattgctttaactatgctaaatcctaatggaagtgttaaataatgaatcaagcagaattgcagcgacacatggaagaagtgtcgctgcaatttttccaaaaagaatttcgccaccaagccgtgtttaatgcgcgcttacgaaccactgggggacgttatttgctaaaaagtcataatatcgaaatgaaccccaagtacctagaaaactttggattagcgtactttatcgggattatgaagcatgaactatgtcattatcaccttcatttagagaaaaaaggctatcagcaccgcgatcaagatttccgcgagttattaaaaaaagtagacgcaccgagattttgtgcaacgataccacgtgaaattaccatgcatgaatatacatgcaaaagttgcgggaagtcctttttaagacaacgcagattcaatgtgaaccgttatcgctgtggcagttgcggtggaaaactaattcaaactgactccaagaaaatttatacagaaaacccgtgaaaagtcttgcattttcgcccgattctgcgtatactagtggaagtcagataattccacagtagctcagttggtagagcaatcggctgttaaccgatcggtcgcaggttcgagtcctgcctgtggagtttggggaagtactcaagtggctgaagaggtgcccctgctaagggtataggtcgctcgcgcggcgcgagggttcaaatccctccttctccgtaataacttataaagacattgtttaggaaactaagcagtgtctttttttgtggaaaatcgcgatggatttgagtctatatatatgctaaagttattttgaaagataagctcaagttgcaaaaaacataatgaagtaaaactattttggaatgcacatttaccaattatgatgagtgttggtgggtgttatgagtattatgctatcgctttaaatgacgaaaatgttgttcatggttcagaacctgaatttgaagaaagtttagttgtagccgactcgttcgcggattttttactgaaaatcgtgactggagaaatggtgataagttaaaattaattaggaaatttgctataataagaaaaacgtttcagaaaggaaaggactatggataataaactagaatttacaacgattgatgaatatattacccaagcgccaccggaaacaaaagaagtgttgcaaaaaataagagaaacgattaaagctgctgcaccggaagcaacagagaaaatcagttatcaaatgccgactttttatttggaaggaaacctggtgcactttgctgttgcgaaaaatcattacgggttttatccagcttctagtggcattgcggcattcgaatctaagctcggaaattacaagcattcaaaaggcgctgtgcaattcccaatcaaagaagaagttccttatgaattaattaaagaaatgacacttttccgactagcagaaaataaacaaaaagcagcagaaaagctagcaaagaagaagaaaaaataagaaggagactttcattgtgatgatgaaagtcttttttgttcggtcttttattttaaaaagactagacatttaaaattaaatgagtataataataaatagaaaacgttttctttttagaaatatatcatgtttgggggaagtaaagtgaataagtttatggagttacttggggaaaagttaatgcctcttgctgcaaaactaggagagaataggtacttaaccactttaagagatgcattcatgttggcatttccgctaacaatgtttggttcgattgcggtggttttaatgaatctaccgttttggagtgatgaaacgaaggcagttttacagttgtatcttggaaatgcccaaagcgccacgatgagtattatgactgtctttgttgtttttggaattggatattcactatctaaatattataaagttgaagcaatttatggaggggcagttgcccttgctagcttcttgattttaacgccatttttctttaatagtcctgatggagagcttattaccggagcactttcgttagatcgacttggggcaaaaggaatgtttatcggaatgattactggttttattgctgcagaattatatcgattttttgttcaacgggattggacaatcaaaatgcctgcaggagtgccacctgctgtagctaaatcatttgcagcacttattccagctatcttaacattaagtatttttttagcaattaatgttatggtacaattcttcttccatacaaacttacatgatgttgtttatactgttattcaaaagcctttagtggggcttggttcaggaattgttccaacactaatcgctttattttttgtccaagtattatggtttttcggcctgcatggtcaaatcattgtcaactcggtaatggacccgatttggaatacgttaatgcttgaaaatttagatgcttataaagctggactcccattgccacatattattacgaaaccatttatggaagtatttactgttggtatgggcggatcagggatgactttagcagtcgttattgcattagcattcttaatgaaaagtaagcaaagtaaagaaattggccgattagctcttgggcctggaatttttaacgttaatgagccagtactttttggtatgccaattgtattaaacgctacgattttaattccatggattattgcacctttgattgtaactactttgaattatttcgtaatggcagctggtattgttcctgctccaaccggggttgctgttccttggacggtgccaattgtaatcaatggtattctcgcaaccaattcatggctaggcggggcgcttcaagtagtcgatttcttcatcgtcctcattatctggtatccgttcttaaaactagtcgatcggacaaatattgcgagagaatcagaggcagctatcaaataagttaaattttccttttcgatatgctataatttgactagaaatggctagacatttttaattcaagcgaaggagcgatcgaattggttaagtatgaattgattgcagcagatatccgcgaaaaaataaacaacggtacttacccaccagaatccattcttcctgatcaagtgagcttatgtaaagcctatgattgtagcagaatgactataaaaaaagcctttgacgttttagcgcttgaaggacttgtttacagacaacggggtgcaggaacttttgtcatgaaaaatgccttagctaataagcaagacgcgagtttgcgggattatgatggtttgacaaaaatgatgggagacaaccgaatctcgagtaaaattattgcattcgatattgccttcccagatgaaaaaacacaagaacaacttttaataaaagcagatcaaccggtttacaaattgattcgtttacggctcttggacggcgcaccatatgtattagagcatacaactatgccggcagatttagttcctggtttaacaagagaaattttacatcattcgatttatgcatacttacaagactcactgggactcgtgctaagcggtgcctttcggaaaattaatgccgataagccatctgaatatgatcaagaatatttagcgtgcggggaacacgacccagtgttagaagtggagcaagtagtgtatttaaaagatggtagaccagtggaatattctaggtcaagacatcgctatgatacaagaagttttattatggttgaccaccgagaaaagtaaaataaagtcagcatgcccgtaaagcatagctgactttgttttatggaggtaaaaatgtataaaaaacttccgatgaaaaaaatgtaaataaaattagaaaaagccgttgacagtcactcagattatgttataataaaaaagctggtgtaagagaaatgaattcaattgaatatatattcatttttcgttttttatctggcccgttggtcaagcggttaagacaccgccctttcacggcggtaacacgggttcgaatcccgtacgggtcactttttttattcattttttatacatatggttccgtggtgtaggggttaacatgcctgcctgtcacgcaggagatcgcgggttcaaatcccgtcgggaccgctcaaaaagaatccaagttttgcttggattctttttttcatacaggaaattggacacagctttttatttgagctataatcttattattcatataagaattgtaagaattaaattggaggaatgaatcatggatttagtgaaaaatgggaaagtattggaacttgtacatccaaatggaaactggacattaattaaagaagaaggtttttctccagttcaaataactgttgcggcggttgctgcttgtagcggatatgtctatcaaacattacttgagaaaaaacgaattgatataaatgatttaagcattcataccgattatgagcaagatcaagaaagtgctgtgcatgtgttaacgaaaattaatgttactttcacagttgatttagtggataaaagtaaccaagcgaaagccgaaaaaacagtgcatttagtgaaagatgcctgcccggttgcgaaaagtttagacccgtcgattgaaattaatgagattgttgtttttaaataaaatgatttatagaccaagccgtggtgcttggttttttttcatctagtttggcttgattacttaaagggaaggctatatactgaaaccaaacaatacaaacgaggtgctggaatatggcagagaaaacaatagtagaaaaattacaactggctaaatataaagaagcagtcatcctaaatcaaccagatggagcggattatttccaaaatctagcaaattacgaagaaaaactagcagacaaacaatacgatttaattttcgattttgttgaaacgctagaagaattaattacgttcgtgcaaaaagttattgctgaaaataaactttccgtggatggatatttattcttcgcttaccctaaaaaaggcaataaaaagttcgctacatatgtacaccgcgatgaattaatgccagcgcttaaaaccgatgaagaaggttacgtcgatggcagcacactcaaattcacgcgaatggttgcactcgatgaaacgtacacggttgttgggctaaaagaagcaacaaaactaaaagcaaaaggcgttaagaaaaataatccttccgcagatgaatacgccgaccatgtacctctagtcgcagaatttctagcagacaaaggcgatttacaagtcttctataacaatctagctacaggataccagcgtgtatgggcgcgctatatttactctgccaaacaaccagcgacacaagaaaaaagacgtttagaaatggtcgatattttgagtcaaggttataaaacaaaagatctttaccgacaagggaaaaagtaaccaaataattttatttggttatttttgtgtttgaaactgcttctttatgtaaaaatgtctaggcgtgatagaatagaagaggaataagacgaaggaaaatcttgttgcactggaaaaggggacatgcaggatggcgaattatattaacaaagaaaggcgccaaattgattttgatccatttgatttacggataattgccgtaccagaagtagtagcggtgcagtttaagccgcgctcagagcatactttacttattcgtattgcggatgtcggcgcaacctatcagccactcaaacacgaatcactttttgaagctattttgcccgttcactttaatgatattaacgaagaagatgattactgggggcttagtgacaaagagcaagcggagatgaaactatttaacgaggtacatcgcgatttgatttataattttgtggatgagcacccagattttacgcagattgttgtccattgtcacgctggggtcagccgaagtagcgcggttgctatggcgattgcggaacatttaggcgacacggacacatacgaaaaacttcaagtgataaaacgatacttaccaaatccgcgggttcttgcgattatgcggggcgaagcgtatttataaaaacgaaaacgaagaaatgttaggagagattttgtatggaaaagcattatgattatattgcgattggtggcggtagtggcgggattgcttcgattaatcgcgcagccatgcacggagcaaagtgtgcattaattgagccgaaatttttaggtggaacttgtgtaaatgttggttgtgttccgaaaaaagtcatgtggtacggcgcacaaattaaagaagcgatggatttatacgcagatgcttatggttaccaagtggacgcgagcttcaacttccaaaaactagtcgaaaatcgagaagcgtacattgaacggattcgaggttcatacaaaaatggacttgataataataatgtagattggataaaaggttatgccgaatttgtcgatgaaaaaacattgcgcgtaaacggcgaactagtgacagcggatcatattttaattgcaacgggcggcgaaccagcgcttccttctattccaggtgcagaattcggcatcacatcagatggcttttttgcattaaaagaacttccgaaaaaagtggcggttgttggcgcgggctacattgcagttgagctagctggtgtattacaacaacttggctcagaaacgcatttgtttgtacggaaacatgcaccactccgaaatttcgatccacttttaacagatacactaaccgaaattatcgagcaatcggatatgacgttgcataaacacgccattccgcaaaaagtcgaaaaaaatccagatggcagtttgacgttgagcttagaggatggccgcacagaaaccgtcgatacgcttatttgggcgattggacgtaaaccagttatcaaaggtcttcaaatcgaaaaatcgggagtagaacttctagaaagtggtcatatcgccgtagataaattccaaaacaccaatgtagcggggatttatgcagttggcgatgtaacaggtcattatgaattaactcctgtcgcgattgcagcgggccgccgtttatcagaacgccttttcaataacaaaaaagatgcacatttaaactatgaaaatatcccaaccgtcgtatttagccatccagctatcggaacagttggtctaacagaaccagaagcaatcgaaaaatatggcaaagaaaatattaaagtgtacacttcaagctttacctcaatgtatacagccatcacagaccaccgcgaaccttgtcgaatgaaattaatttgcgaagggaagacagagcgcgtcattggcttgcacgggattggttacggtgtggacgaaatgattcaaggattcgctgttgctattaatatgggcgcaacaaaagccgatttcgacaatacagtcgctatccacccaacaggatccgaagaatttgttacaatgaaatagaaaacaacgatggaggaggaagtacgtaatgggaaaaaaattatcactttattttgtaagacatggtcaaacctacttaaacaaaaatttgcgcatgcaaggctgggctgatacgccactgacaccagaaggaattgaaatagtaaaagaaagcggtcgaggtcttgctgaaacagagttcgtcgcagcatattcaagtgacttacaccgtacaatcgcgacagctggccacttgcttaaagaaaataaacacgcattcggcttaacgcttgagccattaagtgaatttcgggaaactttcttcggctcctacgaaggtgaaaaaggcgatgttgcctggaacgaaattgcacatcatatgggatacgcgaatcaagaagagctattccaaaaagccgatgtgcgcgaaacaatgaacggtacaaaagcggctgatccaaccggagatgcggaagatttcatgacattttggacgcgcgtagaacaaggtttcttacacgttatcaatcgtcatagagaaactggcggaaacgtccttatcgtcgctcacggaaacactattcgtaacatcgtccacgaactagaaccatccatggacgaagcggttatcctcgacaatgcaagtgttactgtactagcttacgaaaacggcttattcaaattagaacgtttaaatgacacctctcattttaaaaaagcatagaaaaaacgagctttaggaagtagtttcccaaagctcgtttttttattttttcggtgtatctggattaggaagattattatcaatcgccagctgacctcgccgcaatttaattaaacgattaacgttaacgataattgttttcactaccgcataaagtggaacacctaaaatcattccgaagattcctgctaagtttccggcaacaatcaagataatgataatagttagtgggtgaatcgatagagatttacccataatatatggagaaagtaagttagagtcaatttgttgcacaatcgttacgacaacaataacgagcagtgcttggactggagaagtaaatagcgccacgataactgctggagctgctccaatgaatggtccaagataaggaataatattcgttgcacctgcaataaaaccaaacagaagcgcatacggttgaccgataattaaatacccaataaaagtaaataaaccaacaaacatacaatcaattgcttgcgaactgatgtaagtagagattgttttgttcatttctttaataatttgttttgcttcagaacgaatacctgccgggaaaaattttccagaggactcaacaaacttatgaccatctttaaacatataaaagacgataaatggtacagttacaagaatcatgacaaaactagagacaaaggagacaatggctccaaaactagaagctaccccatcaacgaccacagacatgatttttggtaaggaaatgttgagcttctcaagttcttgtttcatatctatatcttttaatgcagaattattcgagagaccttgcagccatttttcaaaatcttgccagtaacctggtattgcttttgcaagttcagctacttggtcagcaagcgttggaccgagttgcattactgcaagaacaacaagcgtgataaaagcgataaaaattacaataacactcaaaagtcgaggtacttttcttttttctaaaaataatacaagtgggttaaataaatagaataggaaccctgctactaaaatcggcataaataatgtagaaactatgatgccgattggtgaaaatatgtacttcatttgtaatagaacgaacaaaatagctacaaccgctaaaatttcaattgtccaaaaaaataatttactatctcgaaatcgtgaaaacttcaaattctccccttctttctaaaaccttattgataaattttatagtaccattaactgctttaaatagccactgaattactgctattgacgtagaagtatatgtgttatacaatatatataacagttgaaggagaggtgtttctatgttacttgcaattgatcttcaatcagacgagccaatttatacacaaatatgcaatcaaatcatcgaaggcatggcgaaacgggaacttttaccaggagacaaattaccttctgttcggagtcttggtgcagatatcggaattaattttcatactgtaaacaaggcctaccaaattttaaaacaagaaggatttattcaaatacatcgtcaaaaaggagtggttattcatccggatggggtagctaaggcagatgagctattttttactaaattacaaacgaagctaaaaccactcatcgcggaatcggttgtgcgcggtgtcaccgaagagaagtggctcgaagtaagtaaagcaatttttgacgaaatgcatggacggagagtggagtagaaatggaaattatcatttatatttttgtcagtattgctatcatttcactgcaagcaataaccccttttgtaataagaaaatcagaatgtttcggagtaaatgttggcgaacgtgctaaccggaatgcagaattaacacagttaaaaaaacaatatgttgggcaagtgattttgtggacctctttcgttgctattatcggaatcgcgttaattcaaggctttcattcgagtgaaaatacgcaagctggtatttttattgcttcgatgtttagtcaattaatcgtttcttttattatttattatcgctttcaccacacaactttacagtggaaaagagacaaaatagaagctggagaaatttcgactaattctattataatggtagacactagttttcatcgcagaaaaatggttatttcgtatacatggtttatcgtgccactgcttattttcattattacacttgcgattacagtcgtattttattcaacagcccccgttgattttcctatccattttgatatgagcggaaccgtgacagatacagtcgccaaatcacctagagtcgtattgttactaccaatgatgcagctaggaatgattgcattgtttatctttattaattttgttattgcacggagcaaacaaacggtagagaacgaaaaccctactgattcattaaaacgaaatatgttatttagacagatttctagtaaagctatgttaattatgtgtacgataatggtgattgattttcttatcatgcaagtagtcacattacttgcacttccagctgaatggatgatggtaacgatgattatttctgttgtcttaattttgtttgggactgtcctccttgctgtaaaagtaggacaaggcggtagcagactcaaatttgctgaccaacctgatggtgtcaataaaccaattcgggatgatgattccttttggaaagcaggggttatttattttaaccgaaatgatccagccttatttgtagaaaaacgttttgggattggttggacgattaatacagctcgcccggttgcttggctatcttttgtaattattatcgctgtcataattcttattagcatcttgttttaacttgccctcaggcgggtatttattatatggtatgcggataaattagtttgtgtgagatgcttttgtaaaggagtagattattatggcgattagattgaagcgactggaggaatgggaaggatttactggtattgcactcgttcgagaaggtcttaaagcagaagcacttcacacagaaataaaaactgccttcaaagaaatactccaacttgcgcgagaactagatgacttttccaagcaaaaaattttttatgggatttctgtccataatatagaagacggaataacgcattattcggcaataccggtcgaacaaaaatattctaatttaaaagaaccgcttgagtggattgaagtgccagcgcatacgtattttgtagcagagcatattcaggataccgatataggtgaaagctatgaagagattgccagagccattcaagaaaaaaattataaaccttatattacggcgaataatcctgtttttgatccactaccatttaaactggaagtgtatacgaaacaaggaagcgacgaaacaaatattgaaattagaattcctgtcgtgaaagaattgcatacgtaagaaatagcctgggacttttgttctgggcttttttatactagcaagctgtttttgagtgtgctataataaaaacgctattttgtgattattttaacaagaaggaagggattcatgtgggatattacagcccgcaggaagtaacagagattacgattgaaaaaggaacccaaaaagcaaattcaagtacattaacacttgtgttgttaggctttttaggtggagcttttatatctcttggttacttattatacatacgtgcagtaggaacaatgcctcacgaatggggaagctttgcaacgctcattggcgccagtctttttccggttggcctcgtttgtattttgctaggtggaggagaattaattaccggcaacatgatggctgttgcaattgcttggtacgacaaaaagatttccttccaacaattacttagaaactgggcgattgtgtccgtcatgaacttagtgggcgcattttttgtcgcttacttcttcggacatttcgttggcttaacagaaggcgatttcttacccaaaacgttagctacagctggcgcaaaaattaacgatcctttctgggttgcctttgtttcaggaattggttgtaactggtttgttgggattgctgtttggctttgttacgcggccaaagatttcgcagggaaaatccttggtatttggttcccggttatggcatttgttgctatcggatttcagcacgttgttgccaatatgtttattattccagctgctatttttgctggttactattcatgggcagattttatttggaacgtcatcccggtttacctagggaatgtagtcggcggagcagtttttgttagcctattctacttccttgcttataagaaaaacgcgcctaaaaaggtaaaagaagaaatacaccaaccaattgaagaaaattaagataaaaaagctagttacattcgatgtagctagcttttttttgaaaaaaataaaaaatttttaaggctattacgattcccgccatgttgggatagaatgactttttccaaaagttattttgctagttgaaaagaaaaatcctgattaaatttttcgatttgtggaaaacactattataagctacgagagcacgtgcagaaaaattttttgaggagtggtatttttgagtattaaagaaacagcattaccaaaagttcaaacaaaattatttattaatggaaaatggacggatggagataataaagaaacaaaagatattgtaaatccagcaaacggagatgttattgcaaaaatcgctcaagctggaccaagtgaaacaaaaaaagctattaaagcggcaaaagatgcatttcctgattgggcaaaaatggaactagctgaccgtgtcaaattattacacaaaattgccgatttaatggaagaaaaagcagatacgttagcaaaaattatgacgcttgaacaaggtaaaccgctaaaagaatcaaaaggagaagtcttaactggcgtagaaaacttccgattcgctgcggaagaagcaagaagattatatggtgaaacaatccctgctccaaacaatcatgcgtttatcgtgaaaaaacaaccaattggcgtagttgctgctattactccttggaatttcccaggtggtatggtgacgcggaaacttgcaccggcgctggcaactgggaatacaattgtattaaaaccttctggagatacgccgctttcggctctagctatttttgaaatttttgaagaagctggcttgccaaaaggcgttgcaaatatcgttatgggtagctccaaagaaatcggtgaaacgttaactgatagtgatgatgttcgtaaactaactttcactggttccacgaaagttggtcaaacactctttaaacaatcagccgatacactgaaaaaaatctcactcgaacttggtggtcatgcgccatttatcgtatttgatgatgcgaatcttgatgccgctgtaaatgatttagttgctgcaaaattccgcaacaacggtcaagtatgcgtgtcaccaaaccgaattttcgttgccaaagaaatcaaagaaaaattcactaaagcgttagttgctaaagtagaacaattaaaagttggtaacggtttagatgacgtgaatgttggtccgcttatccgcgaagatgcgatagataaaattgataaacaacttaaaaacgccacagaaaaaggtgctaaagtcttaactggtggcggtcgtctaacaggctctgactatgataaaggaaacttttataaacccactgtcttagataatgttacccgtaaaatggacattttttatgaagaaacatttggtccagtaatcccgctcatcacatttgaaacggaagacgaagcaatcgaaatggcgaatgacagtgaattcggtcttgcttcttacttctacactaaagacttagcacgcgtagaaaaagtgggagcagcactagaatacggaatggtcggagcaaatgaaattgccatctctaacccagaaactccatttggtggagtaaaacattctggtttcggtcgcgaaaacggtcattatggaatggaagaatacatccaagtgaaattcatcaacttaaaatatcgtgattaaaataagcaatataacaaactccttcgcttcaagcggaggagttctttttatgcagtttcctaccagtaggaaaaaaacatatttgtaagcggattcagcggtttatataataaaagtaagttaaggaaagggaggatacaaaatgaaaaacattttactcatttgcggatcaggagcttctagtgggtttatggcagcagcgattagaaaagcagcaaaaaaacgtggagaacaagtgacagtgaaagcggccagtgagtcacaaattgatgaaagaataaatgaaattgattacttattaataggcccgcacttggcttatatgctggatgacttaaaacaaaaagtagctgataaagatgttttagtatcaattattccgcaagcaacttatggcacacttaacggcgaaaaagcactcgatctcattttaaatatggagggataacaggatgaacaacaaagtgatggattttatgacaaataaatttgctcccaaagtaaataaagttgttaaaaatccttgggtatcagcaattcaagatgcaattatgtctgcgcttccgctcgtttttgtcggttctttagtcaccatcgtttcattacttaaaaatttattccctggtatgcctgacttttcgatgataagtaatttttcctttgggatgttcggattagttgtagcatttctaattccctactatctgatggagaaaaaagggaatagcagtcaaaagttgatttctggcgcaactggacttgtactatttttaatgctactatttccaactatttcagctgacggggatgcagttttcattttatctcgatttggcgcgaccgggatgttcttatcaatcacaactggattatttgttggttgtgtgatgaactttgctgcgaagcgatcatttttcagtgaagatacgccaattccggattttgttgtcgggtggttcaatagtttactaccaattacatttattttaattgttggttggttaattacggttcaatttaacattgacttctttgaagtaattgttgcagtgtttagcccactcgcgtcaattgtacaatcttatccaggctttgtgctttcggttttcattccagcatttctttatacattcgggatttctgggtgggttatgatgcccgcgatttacccggtttatatggcaggactcgcagaaaactcacaagctgtagcaaatggagcgagcgcatcaaatatcgcaacacaagaaacagtttatgctttaatttcaataggcggggtgggtacaaccttatcactctcgattatgatgctgattttaagtaaatctttacagctaaaagcaatcggaaaagcagtcatcgtcccatcaatttttaacatcaacgaaccattattcttcggggcaccaattgccttcaacccatacttaatgattccaacgtggattaatgcttttctagtaccgagtattgcttactttgtgatgtcaatgaatctagtaagtattcccgcgcaatcattcttactttggtatatgccttacccagtaacatcttacttagcaacacaagacttccgtggggttattgcttgtttagcaattatcgtcatcacatggctcgtctacttgccgttctttaaagcatacgacaactcattactcaaacaagaaaaattagatgcagtcgaaacagagaaagaaatggtaacaaattgattggaggaaataaaatgtcagagcaagactatgttgaagaaacagatagcttaaatgagctatccatgaatatattaatccatgctggaaatgcaagaaatgatttagtgaaaggtcttaatcatttagaggaactagagtttaacgaagccgaggaatttatcgcctctgccaaaagagaaattgtcatcgcgcatagtctgcaaacagatacacttcaactagaagcatcaggcaatcaaatccgttattccacgctgttctgtcatgcacaagatacactcatgacggccaaaagtgaaatattaatcggcgagcatatgctacgtttattcaaaaaaatgaccgaacttacgaaaaaataggaggtacgagcatgtttgaaaattatcaatttccgaaagacttcttatggggtggggccatcgcagccaaccaagcagaaggcgcatttaaagtagatggaaaaggaattagtttagcagatttgcacaaatatcataaaggtaaaacaaatgatgagattagcgaggaacagcataaaggagtaagtttagctgatatcaaagcaagtatagaggataaaataaactattatccgaaacgccacggtatcgatttttatcacacgtatccagaagacttggagttgcttgctgaaatgggttttaaaacattccgaacttcactggactggacacggatttttccaactggcgaagaaactgaaccaaatgaagcgggattaaaatattatgaccaattaatcgataaaattatcgaacttggcatggagccaattattacgattttacattacgaaactcccgtggaaattgttttaaatcatggcgggtggcacaatcgtaaagtcattgatttatttgagaagtacggcaaaacagtacttgatcgctacaataaaaaagtaaaatattggattgtcattaaccaaattaatttaattcaattcgaaccatttaactctactgcgattccatacgatgcagttgatgattatttatccgcaacatatcaagcagttcacaatcaatttgtcgcaagtgcaaaaatttatgaatacggaaaggcactgaaccctgatttaatgattggtacaatgctagctgattgtacggcctatccattctcatgcgatccggatgatatcgtcctcgcaatgaaacgtaatcgtatggaatatttcttcgcagatgtgcagttccaaggcgaatatccacaatatgcgcttaactacttcgaagaaaataatattcatattgaaattacagaagaagacaaagctattttgcaaaaaaataccatggattatctagcgctttcctattattattcacaaatggtagattccaaaagaaatgatttggacccagcttcgattacaccaaacccgcatcttaaagctaatccgtggggctgggcagtcgatccaaaagggctatataatgctctgtcacaatactgggatagataccataaaccaattattattgctgaaaatggtttcggcatgtatgacaaattggaaaatggcgaaatccacgatgattaccgaatcgattatttatccgcccatctaaaagaaatgaaacgtgctatgtatggtggcgtagaaataatcgcatattgcgcttggggaccgattgatatcgtcagctgttcttccgcacaaatggaaaaaagatacggtttcatttacgttgatttagataacgaaggaaacggcacaggcaaaagaattaaaaaagacagcttttcatggtataaaaaagtaatagagtctaatggggaagacttagaagcttaatgtaacagagcgccagttgtggtagttgatagctaatacaactggctttcggtatatagggggtaacaaaaaatggatactcaaaaagaaatactagcttatttacacaaacaggaaaataagtgggttacctcaaatgagttagcagctttttgcgagtgtacgacacgaaccattcgcaacaacatatacaaaattaacgaagtaacaccgaatttaattaattccacaaagcaaggctatcaaatcaatctgaatattccatttgaatttcaatcggaaagtgatgtaacagaacgaaagtcaaagctcttacttgaattaattaaaaactccactaaaggcgttgacctttttgagctcgctgacattttatacatttcagaagtgaccttaaaaaaagacattcaacaactaaaaaatgagttaaaagaggctgatgtcaaaatcgtcatcagtaaagatcgcatcaaattaatcggaaaagaacgcgccaaacgaaaatatatgatttccttactatacgaagaaggaggatatcgtgaaagtatcaaaagtcgcattcaagaaatgatagaatttgtctctatcgacaaactgcaaaacatcgtaaaagaagttttagcgcaagaatctattacaaccaatcaatattcgatgatgaacattgtcttacattacgccattagcatcgttcgaatccaacaagggaatacactcatcgaaacgcaaaaaacactcatccgaaaacactccaaagaatacgaaatatcgaaaaaaattgctaaaattctttcggaagaataccaaatccatttttcagaggcagaaacaaaacaactcggacttttatacgttggtcttcaaaatgaacaatctgctaacgccaatcatggcgaactggaccaatttgtagacaaaaaaatcatcgacgcacttaaaatcgtgctcgctaatgtggaagaaacttatctcattgacctccaaaacgagcaacttttcatcaaattagctattcacgtccaaagtctatactatcgctcacgctacaaagcttatacaagaaatttaagcctacttgatattaaaacttcctacccagtaacttttgacattgccgtttacatttcttctttgctacaagaaaaactagcgattgactttaacgaagatgaaatttcctttatcgcgctccatattggctcttttctagaaagtgaaaaccgtgattatattcgcttggaaatcggccttcttgtcgacgattatcatgatttaagaacaaatatgctgaaaaaactgcgcgcacgatttgataatgaagctaccatcgaactgatagaaaacgaggattacgaagaaaattttgatatcattttaacgacaaaccgagatgttgcccttgaaaaggcaggttcaatttttatacatcctttactgacgaccaaagatatcaaaaaaatcactagccgaatccaaacaaagaaaaaaatcttggaaaataatataagaggccagcaaattgatcgctatatcgttcgttccctctactcgaaccaaattgacccttcagaacttacacctgcaaaaattagagagcaaatgatttctaaaatggaaaaacaaaccttcgtcactccagagtttaaagaaaaagttgaaaaaagggaacaaatggcgccaacaagctttccgtccggtattgctataccacattctatcaagaatgatgccctccaaagtggtgtatccataatgactttgcaagaaccaatttattggaatgatgtcaaagtaaaaataatcaccctcgtcgccatcagcaaaaaagatgcaacagagttcaacgatttctttgaaaaatttgtagaaattgtctccgaaccaatcaacaccaaacgtttatcaatggtggaaagcttcgaggagttcatccggaaactaaaaatgatgatggaagaaagtgaataaattcccacaatgtaagccgtgtatttcaaacgacacggcttataaaggttgaagtaacaataaaattgcgctataatataaccatcaaatgaaaaggagtgttatcttaagccaatgaaattctaatcctgtattatatgaaaaaatgaagaaagctatccacttctcggatagaaactattttttcggacgggattcgtatgttcatttcgcatgataactcttgctataggcctttttggcgtagccccgcggattcctctctgaaaatattcaggaggttattttttatgtctacaatcgaaataaatcaattaaaaatagaagtagcagatagagttttagtagaaattcctcatctgctagttagtaaaaaagcaagaatcggcatcatcggtcaaaatggtctaggaaaaacaacactaatggaagtgattgctggcgctaaagaagcgacatctggcacggtgactacacaaggaaaacttgcttacatcaaacaactttccacggatacaagtacgaaaagcggtggtgaaaaaacaagaaaagctactcaacacgcgatgcgccaaaatccaagtgttctcctagcagacgaaccaacaagcaatcttgatgtcgaaagcgtcaaacatttagaacgtcagtggagcgatttccacggtgcgctcataattatctcgcatgaccgcgcttttttagatgcactttgtacagaaatatgggaaatcaaaaaccaaaaaattcacgtgtacaaaggaaactaccacgcgtatttagaacaaaaacaacaacaagaaaaccaagcagaacttgcatacaaagaatttaaaaacaaaaagaaacaattgcaagcatctcaaacacatcacgaaatcgaagcaggtcgtatcgttaaacccgggaaacgcttaaacaacaaagaagccagcgcatttaaagctggaaaaggaacacaacaaaagaaacaacatagtacaatcaaagctttagaaaaacgaattgaacggcttggtaatgtcgaaaaaccacatacaactaaaccaatcaaaattatcaccccagacaatcgcgttataaaaaaaggcaacacgatactaagtgccaaagaaacagcttacgaaattgccggacgaaaactatttgaaacaaaagctttttctattaaagcaggggataaagtggcgctgatcggtgaaaatgcaagtgggaaaactacatttttaaaagaaataatccaagaaaatcctaatctcttatgtaatccccaagcgaaaattgcttatttcgaccaagaattgaatggattaaaccaaacgaaatccctattagaaaacatctcggaaattagcgttcaaaccaagcaagtaaacagagaagtactaggtagtatgcattttaaagaaagcgatttgcataaggaagtgcgcatgctctctggcggggaacgagtgaagttgctgctcagtatgctccttcttagtgacgccaatttcttgattcttgatgaaccaaccaactatttggatatctacgcaatggaagcgctggaaacgttaatcaaacaatttgcggggacggtactcttcgtttctcatgatagaacttttgttaatcatgtggcagaacagttacttgttatcgaaaataatgaaatgaatttccaccggatgacttttgcagaatatgaagaaagtaaagcaccaagccggattacagaagaagataagttgattttagaaatgcgtatgtcagaaattgcggcaaaactcatgcaacccaatttaaagcccacagaaaaagccatactcgaacaagattatcaagaaattatcacaaaaagacagcaatttagttaaattgttgtctttttattcaagctaaataaaaaatatagtcatttatcttttacttgatttctgcaaaagataggcttagaatcaaatagttattaaaaagagtaaagaaagaaggaatcccatgtttagtcatcttccggattcattcctacaaatgaataccatttttatttctattttgattgaggcactgccgtttgtattaattggtgtttttattgctggctttattcaaatgtttatatctgaacaatttattgcccatgttatcccaaaaaataaatttctagcagtcattgttggctcgcttattggtgtatttttcccttcctgtgaatgcggcattgttcctatcgttcgtaatttgctggcgaaaggtgtaccgcttcatgccggaatcgccttcatgctcacagcgccgattattaatcctgtagtattattttcgacctatgttgcgtttggaagcacctgggaagttccgctgttacgcgttgccggaagtcttgtagtggccctcgttgtcggaaatattatcgcttatttatataaaggaactggactcaaagatcgctttttaaagtatgaagcagccagtgaaaaagtagccgttccagccgcaaatatagcgcttgctggcggccctgtagaaagtgcgacaactaattttcaagtattaacaactgaagcggttcccgcagaagtagcgcatacaaaccatgcgcaccatcatcacggcgaagagcacacgcatacaaaaatgacattaagtcaaaaaatatggcataccgtacagcacgctgtcgatgaattcttttctgtaggtaaataccttgtgtttggggctttaattgccgcagcgatgcaaacgtacattaaaacatccacgctcgtgtcaattggacatgggccgattttatcaatcttacttatgatggttcttgcttttgtattatcactgtgctctgaagcagatgcctttattggcgcttctttccgtagtgttttctctacacaatccatcgttgcatttttagtgtttggcccgatgcttgatattaaaaatttaatgatgatgttaggagcatttaaagcaaaatttgttttattaattgttactagtgtaacgattgttgtctttttatacgccctagttatttaaccgaaagtaggtgagcagatgtttcgcgtttttattttatttggatttggtttttatttgatgcagctacatatttctggtgacatcagtaaatatattaatatgaagtacgcttatttatctttttccgcgatgattgccgcatttttacttgcgattattcagctcattatggtttttcgtgatgaagatattggtgcaaaaacagaacatatggggcatacacatgatggcgagaatactattttaaaaaaaatcatggtgtatggtttactttcttacgctttaatcgctggtttccttttcccagtagcaacgcttgattcaacgatagtttctgctaaaggttttcattttccgaaaaacaatgcagctggcgacgacccatacgctcaaaatcagtttttaagaccagacacgagtggctattttggagaaacggattatgaaaaaatgatggcgaaagaaaaagccgaaatcatcgatcaaaatccaatcaaagtcaatgatagtaattacttaatgacgatggaaattctttataattatccaggggagtttactggcaaacaaatcgagtttactggttttgtttataatgatgaagtgaccaaagataataacttattcttgttccgttttggaattattcactgtgttgccgattcaggtgtgttcggaatgctcgttcaaatgccggaaaagaccaatttaaaaaacgatacatggcttacagtaaaaggaaccatcacccaagaatattattctccgttcaaaatgaacatcccgtctgtacaagtagaaagctataaagaagtagcaaaaccaaaatcagtttatgtctatcgtaaatattaaatcgctacttgcggatttatgcagcttgcgttatccttaaataaagctgtttacgttttcacgaatgaattaaaggatggaacattgaatgaatgattacaaccactactttcatttcccacgagaagaatggcgcaagctggaagtgagtaaggaccaaattttaactgcagaggaactggaagaaatacgtggtttaaatgaccgaatttctttacaagacatctctgaaatctatttaccactaataaaactaattgcgattcaataccatgaagcgatttttattcatggcgaaaaaatggaatacttgaagaaaaaagaatcgcgtgcaccatttattattgcattagctggaagtgtggctgttgggaaaagtacgacagcacgtgttttcaaattaatgcttgatcgctggttctccaaaactagacaagtagagcttgtaacgacagacggctttctttaccctaacaaagttctagaagagcgcggtatcatggacaaaaaaggcttccctgaaagctacgaccgcgaccgttttgctaagtttttaaccgacttaaaagcaaataaagaagatgtcgaaattccactttattcgcatttcacttatgatgttttagacgaaactcgcgtgattcataatccagatatcgttattattgaaggaatcaatgttcttcaagctgatcaacatgagagcctgtttccaagtgacttttttgatttctcggtttacatggatgccaatgaagcggatattaagaaatggtatttagagcgtttcttcatgcttcgcgaaacagctttccaagatgaaagttcttatttccacccatatactaaaattagcaaacaagaagcagaaacatttgcactcggggtttgggatacaatcaacggcgtcaacttaaaagaaaacattgagaaaacaaaatatcgagccgacttagttcttcaaaaaggcacagatcatctcatttcagacatttatttacgcaaataaccgaatgcaaagagaaggaaacttcttgatgcgttcggttttttctttacattggagaaaatccgagtacaataggaagtgagtaatcactcattttgagaaagggagggaaagcaatgtcagaaatagcgattaaagtttctaatttagatgtgaaaattggaaagaaacaaatcttaaccgatatgactctcgaaatagaaaagggcgagatatttggcttaataggaccatccggtgcggggaaaacaacgctcgttaaaaccatcattgggatggaaaaagcaacgattggcacaaccgaagtgctaggaaaagtaatgcctaatttacccgtcattagtaaaattggatatatggcccaatcagacgcactttatactgatttaacagccaaagaaaacttggattttttcgcttcactatattccatcaaaggtgctgccaagaaagatcgaatgaattatgcagctactctagttaatttacaacaagatttaaccaaaaaggtaaacaattattcaggaggaatgaagcgcaggctttcacttgccatttctgtacttgctgacccagatgtcctaatctagatgagccaacagtcggcattgatccagaactaagaaaaacaatttgggaagagctagatgatctaaaagcgaacggtaaatgcatccttgtgacgacacacgtgatggatgaagccgaaaaatgcgatagacttgcaatgataagaaatggggaaataatcgctgtagggaccccacaagagctctcaagcaaaacgtcatctggtaagctagaagatgcctttttagagtttggagggaagcactaatgcgaatacttgcaatcgtcaaacgcatcattaaccaatttcgccgcgacaaacgtacgcttgccctaatgtttcttgcgccactgttacttattacgctactcacttatttattcgaaggtgacacagtgaagccagttgttggtgtaagcggactttctgattccatggtaaaagaactgaaagcaaacgatttaaccatcaaaacctattcagaaaataccgatgtaaccgctaaaataaaagatgccaaccttgacgcttttttcaaacaaaacggtgaaaaactcgaagtcacctatgaaaatagtgaaccaagcttgagtaaagaaatcggattaaaattacaaaaagcattgatgaccgagcaacaagcacaagcaaagaaccaagcaaaggcaacaggagaagctttagctaaagctggaattgatccaaacagtattccaacacttaccgccagtccggagaaacttacactctcaacagattacgtttacggcgataaagatactagctttttcgacacaattagcccgattttcattggctttttcgtattcttcttcgtatttctgattgccggtatttctttcttgagagaacgaacaacaggtacgcttgaacgactcatggcaaccccaattaaacgtatcgaacttgaattagggtatttgataggctttggtatttttgcgttactacagtctatcttagtcgcagttttctccatccaagtgcttggcatgatgcaaaacggctccttattctatgtattactaattacattaacactcggcatggtttctttagcgctaggaattttactttctacttttgcaaataatgaatttcaaatcgttcaatttattcctatcgttatcgtgccacaagtgttattttgtgggattttcccgctcgatgggatggcagattggctcgtgtggattgcccacataatgccgctttactacggcgcaaatgcactaacatccatcatggtaaaaggagaaggattcgcttcgtttgcaactgatttctatattttactaggatttgtgctcgtatttgttatattaaatatttttgctttgaaaaaataccgcaaagtttaaatgaaacaggaggagataagacgtggatgcagaaggagatattatccgtcaaatgcttgatttaacggaaaaagaaaccaagatgagtgaaaagcagcgccgaattgtcgctgcttccatcgaactatttgctgaaaaaggttatgctgggacttcaacgaatgaaattgctaaaaaagcaggagtcgcagaaggaactatttttaggcactataaaacaaaaaaagatttattaatggctatcacgatgccaacgctcatcggtggggtgataccatttttagcacaaagttttgtcaaagaagtatttgaaagtgagtatccggattttcagtcatttattcgggaaatcatcgttaatcgctttgattttgccaaagaaaatggtaaggtcatcaaaatttactttatggaactgttttatcatgatgagttaagaatacaattttcagaaatttttatgacacatgtcaaagggcaatttgatcaaatgattgattattataaagagcgcggagaaatagttgatatgccgaatagcacgattatgcgcgcccttatcacgaatattgtcggttttatgctaacaaggtttgtcgttatgcctgatgtggagtgggatgacgcaaaagaaattgacgatacggttgcatatattatgcgaggtttaggcaaataaaaaagagtccagatattctggactctttttttatttatcggatgaatcagttgattttttcttattgtaattgtatttacttggatccacttttttgaaaccatcaggagcatagaaacgcaacaagtcaccttgtagtacagaatctgaaagctctaattcttttgctactttttctttggtttctttcatttcttttgtttccgtagcaatcggttccccagtttgttgattatacatgttaccaccaatcattgaataggtaggagttatataatcaccgtttcggaatggaacaagttgtttatggtctttagaaagtaaatctgtaccaaattgcaagtactctttattatcaacaccaagtaagtgaagtaatgtaggaagtaggtcaacttggccaccgtattgttcttgaacgccaccttgaacaccgggaacgtgaatcattaaaggaacacgttgcgcttgggcattttcaaaagtgttgtaatctttaccaagaatttttgtcattgcttcttcatggttgtcggaaataccataatggtcaccgtacatgataatgacagagttatcgtaaagaccagatttcttcaagtaatcaacaaagctcttcacagattcgtctaaataacgagctgtttggaaatacgtatctacagatgaatcgcctgttgttgccggagcaatcgaagcatctttctcatcaattggataagggaaatggttcgtaagcgtaataaatttcgtgtagaacggttgttgtaatgacgatagatattcttcggactctttaaagaatggtttatctttaagtccgtagttagaaacatctgcttcgttcatatcatagtaactggcatcaaagaaattgtcgtaaccgaattgtttataaatttcatcacgattccagaagctcttatagttaccatggaatacagcacttgtatagccttgttggcctaaaatagcagatgcagattcataggtgttttgccctttagtagtaaaggcagaaccttgaggcaggccgtaaagcgagttctcaagtaacatttcggagtcagctgttttcccttgtccagtttggtggaagaagtttgtaaagcttagtgtattttggtctttaaagaaagagttaataaacggcgttacttcttctccatttaatttgtaattcactaggaattgttggaaactctctaaatgaatataaatgacgtttttgccttttgctttaccgaaatattccgggtttggcgcggcatatttggatttagtatagtttaaaacttcagtaacatcactactatcagcaagtgcacgctgggtagatgattcagtacttttcactgcgtcgtagatttggtagttagtcatacctagatatttaacaatataatttctatcaaatgttcttgttaaaagttgtggacgatcaatttctgcaagtcccaaattcccaaagaacattgcgataccaagcgttagaaccccaactacttttctcgcacgaatacgggctgttttgtttggttttacaaagcggaaagcaagtagtgcaattaaaatgataatatccgcgaagtaaataatatcgtgccagctgagtaacgctgtgatactacttcccatgtcgcccatgttttgcatttgttttgcgtttagattcggaagcgtaatgaaatcactaaagaatctataatatacaatatttgcgtaaagaataaaactcattaaaaagtcaatgacgataatccaaatgaatgaacgacgtcccttggcaaagagcgcaagacccataaagaaaatggccccacttaatggattaatgaacagcaaaatttgctgcatcagattttctatgccaagtttaaattcaagttgatatgcgatatacgtttttagccaataaagaatgacggctagaacaaaaaatccataattcttgcttaaaaacgtttggatttttattttccaatccttcatgaaacacctctcctacacactatttgctcgttttatttgttattttgaaatgaaaaaaagaagctgtattatgtaacaagaaacaattcatacagcacccactttaacataattctaacacaagattaataaaaggcaagctataacctatacgtctgaagtaggatttaagaggaaataggctgatataactagtcaaaaaagaaccatttggaatggaagtctgctagaataaaaagaaaacattgaggtatgaaatggaagcgatgattacgaaagaattttttgaaagtaagacgacaatcgaattagcgagagatattctgggtatgcgtctcgtacatcaaacgaatgagggacttctatctggactaatagtggaaacagaagcgtacctcggggctacagacatggcggcacatagttttcaaaatttacgaacgaaacgaacagaagtaatgttttcatccccaggaacaatctatatgtaccaaatgcatcgccaagtgttgcttaattttataaccatgccaaaaggaattccagaagccattctaatacgagccatcgaacctgacgaacaagccaaacagcaaatgacacaaaatcgtcacgggaaaactggttatgaacttaccaatggccccggaaaattaacgcaagctttaggattaagtatgcaagattacgggaaaactctttttgatagtaacatttggttagaagaggcaaaattgccgcatttaatagaagcaactaatcgaataggagtacctaataaaggaattgcaacccattatcctcttaggtttactgtgaagggaagcccatatatttctgggcaacgaaaaaatagcattcggactggtatttggaaataactttacaattttgtcacaggtagggaaaatagttttatcaagacactgattttctttgcttcataagaagagctactatataatgaaatagttacaaggaggaatcatatgttaaagaaaacaattgcaataataattttaatcatcgggctactattaattttttccccattcatcaaaaacggcattgtgaaatacatgagtggtcatgaaacaatcgagcaatataaagcatcagatataaagaaaaataatgaaaaagacgctacatttgattttgaaagtgttcagctaccttctatgacatctgttattaaaggagcggcaaattacgacaaagatgcagtcgttggttctatcgcagttccatctgtagacgttaacctattagttttcaagggaacaaatacagctaatttgctagctggagcaacaactatgcgttctgatcaagtaatgggtaaaggtaattatccgctagcaggtcaccatatgcgtgatgagtctatgttgtttggcccaataatgaaagtgaaaaaaggcgacaagatttatctaacggatcttgaaaatttatacgaatatacagttactgaaacaaaaacaattgatgaaacagaagtaagcgttattgataatacgaaagatgctagaataacgctgattacttgtgataaaccaactgaaacaacgaaacgttttgtcgcagttggtgagctagaaaaaacggaaaagctaacaaaagaactagagaataaatatttccctagtaaataatgaggaaaaaaagacagcggattttctaagctgtcttttttctggataatttctccttttattataaatgttgtatcatataaatgaggtttactttgagaaaggaagtgcagtgatgaaactaaccgtttttggacattggggtggctacccggtagcaaatgaaggcacatctagttatttgctggaagaagctggatttaagctgttaattgatgttggtgcaagtgctgtttctattatgcaaaactatattgatcctgatgatattgatgcggcaataatttctcattaccatccagatcatgtagcagacgtaggaattttgcagcacattcgattgctctcccaaaaaaaagaaaaaccgccagtcttgccgatttatgggcataaagaagatgaacgtggctattcttatttagaaatggcgaatgtaacaaaggtaatcgaatataaagcagacgatacactcgaaatagggccgtttaaagtaactttcttaaaaacgattcatccggtaccttgctatgcaatgagaatagaagcggctggcaaagttttcgtatacacagcagatagcgcttatcaagatagctttattccttttgcagagagtgcggatttattagtaacagacaccaattttttccatgacctagctggaaaaacaaaagtgcatatggcaagtacagaagttgcaaaaattgccaaagaagccaatgtgaaatcattactccttagtcatttacccgaagttggcgatttagaagttctaaaacaagaagcagcggctatttacaaaggagaaattgcgctcgcttccaaaggattcacgaaaacattttaatatagaagaaaaggggtaggagtatgtattttatagataacaataatgagaaagatccacgtattaatttagcggtggaggaatttattttaacagaattaaatctggatgagcctgtgctgttattttatattaataagccatcgattatcattgggcgcaaccaaaatacagtagaagaaattgatacagagtatgtggagaaaaatgatgtcatcgttgtgcgcagactttctggtggcggcgcggtttatcacgatgaaggaaacttaaatttcagttttatcacggaagatgatggagagtctttccataattttgcgaaattcacacaaccgattgtggaagctctgaaacgtttaggcgtcaatgcggaactaaaagggcgtaatgatttattgattgatggcttcaaagtttccggtaatgcgcaatttgcaacaaaagggaaaatgttctcacacggaacattaatgtatgatttgaacttagataatgttgctgcatcgctaaaaccacgtaaagataaaatcgaatcaaaaggaattaagtctgttcgtagtcgtgtagcgaatatttctgatttcatggatcaagaaatgacaaccgaggagtttcgagatttactcttactttatatttttggcgtggaaaaagtagaagacgtgaaagaatacaaactaactgccgcagattgggaaaaaatccacgaaatctctgctaaacgttatggtaactgggactggaattatgggaaatcgccaaaatttgacttaacacgtacaaaacgtttcccagttggtgcagtagacgttcgcttgaatgtccaaaaaggtgtgattacagatatcaagatttttggtgacttcttcggcgttaaaaatgtggcagatatcgaggagaaattagttaatactacttataaacgtgaagttttggctgaggctttagtagatatagacgtaaaagaatactttggtaatattactaaagatgaatttttagatttactttattaaaaaaatggaaagcacgcgggatgcgtgctttccatttttttatttgagattttttcctgacatccagtgttctaatcgttttccaacaaaccataaaataacgacagaaacagctaatatagccagtttaagcggttggtgaatcaagtctacgaaatcatagccaatatagctaatagcgaatacttttattaatttcccacctacaagcgctaatataaattgatacactttaattttagagagacctgcaacgatatttacggcagaagatggagtaaaaggcattacaagtaaaataaaaatcggactaaaaccatgtctatcaatccattccattactcgtttaatttgtttatgacctgaaataaagcgtaaaaaacgagtttgcccaaattttcgtgctaacaaaaatacgcataaactaccagcaatggctgcaataacagagattaaaaagccaatgagtagtccatatgcatttacgttcactacaacgaaaactataaatggtaaaaatggtaaaaacgcttcaataaaaggtaagagaaaagctaaaagtggacctagatttcggtactcacttagccagtacattaaattatcataagaaaagaaattcatcatatcctgccaaaatgtcataagcaagcctccagtggtctttaactacataatttattttctcacataaaaatgataaagcgctaataaaacagcttgaatatagttaaaatcctagcattttaaccaggattttaactaaatattatttttggtcagaaaaaccattttcttcttctataatataaagcggacgatcttttacttcatcataaattcgaccaatgtattcaccaattaatcccagaatgaaaagaattgtccctccaaaaacaagttgtaaaataataatagaagtccagcccgttaatgttgtatcagtaaagaatcgttggaagagcactataattaagtaaataaagccaataaatgctgttaaaacgccaagatagcttgcaagttttaagggccgataagaaaaagaggtgataccatctatagataatttaatcatttttttgagtggatattttgtttctccagccgcgcgttcatctcgttcataatgaagggctgtttgtttaaagccaagccaacttacttggccacgaacaaaggggtttttctcatgtaagccagcgagttcgcgacaaacttgcgcatccataagccggaaatcccctgtatcaactggaatattgatatctgttaatttagttaaaatacgataaaaaagagaagcgctttgttttttaaagaaagtctcgccttttcgtttgaggcgctgtgcatatacaacttgatagccttctttccatttctcaaccatttcaataattaattcaggaggatcttgtaaatctgcatcaattacaataacagctttaccgtgagcataattggcaccggcagtaatagcaatctgatgcccaaaattcctcgaaaaatggattgcttttacacaactatcttctgcgcttaacttttgcaacatactcttcgtgagatctcgactaccatcatttacaaaaataatttcgtagggaccgtcaagtgtttgcatgacttctgtaagccgtttatatgtttttagtagaacttcttcttcattaaaaacagggactatacaggagtattcaatacttttttccatacttcacacatccttaattaagttgataaagtgtcccgccactagtaccatttatccgttagcattaaattcgatgttgtatgaagcactagaagtagtaccatcgttatcagaagtaaaaacatttttgtaaaagtcaacgatcgctttaccatttcttctatccattttaccacatctgagtcagaagctttaccattgagagaagataaatatattttatatcgtgattcttatttatttgagtaaaaaagctttaaagaaaacaaatatttattttttataaagaaattccagaaaaagccttgtcaaaacatacatagaatggtattatataaaagttgttaaaacactaagaactacttactatgcgggtgtagtttagtggtaaaactacagccttccaagctgttgtcgtgggttcgattcccatcacccgctttatatttttataaatcctgttatcaacgcagtgtttcgacctttttaagcgaagcattgcgtttattttattgcctgaaaataaggagagaggggatgatggtagtgaagcagaaagctgattatgcagcgttaaaagaagagctcattgcttatgcatatgaaattggtattcaaaaaattggtttcacgacagcggacccttttttatttttaaaagaacgattattagaggcggaagcgctggacctttttacgggatttgaacatccagtaattgaagagcgagtttatcctgaacttatcttcaaagaacctcagtcgattatcgccattgcacttgcttatccgtctaaattaaaagaagcacctgtgagtaaaaaaggagctaggcgaggtgtgtttgccagagcttcttggggaattgattaccataccgttttgcgagaaaaattagcgctactcgaaacttttttaattgagcgattacctgatgtacgaatgaaatcgatggtggatacaggggaattatcggatgtagctgtagcagaacgagcgggaataggctggcgggggaaaaataccttgctaataacgcctgaatacggctcgtgggtttatttaggtgagatgataaccaatattccctttgaaccagatacccctgctagcgacttgtgtggaagctgtaatcaatgtgttaaagcctgtccaacgggttccttactaggggaagggaaaatgaatccgaaaatatgtttaagttatttgacgcaaacaaaagactttctagatgaaaaatatcgcgaagtgttgcataatcgtttgtatggttgtgatacttgtcaggtagtctgtccgtataatcgtgggcatgatttccactttcatgaagaaatggagcctgatccagagcttgttcgaccagaattaaaaccactattacacatttccaatcgcgcttttaaagaacagtttggcgatatggcgggttcgtggcgtgggaagaagcccattcagcgaaatgccatcatcattctagcgcggtataaagataaaacagctgtaccagacttaatcgactgtttgcaaaacgatccaagaccagtcatccgaggaactgccggctgggcgctacgaaaaattggtggaagagatgccgaagaagctgtcgagcgagcacttcaaaccgaacaagatgtacaagtattacaagaattaacagccataccaaattaatagaaaccaggtgaaaagaaatgccaaaccatatcgtactataccaaccagaaataccagcgaataccggaaatatctccagaacatgtgccgggacagatacttacttacatttaatccgtccacttggtttttcaacagacgataaaatgttaaaacgtgctggacttgattactgggataacgtgaaactttcctattacgattctctagatgaattcttcgagaaaaatgaaggcggagaattttattacattaccaaatttggtcgtcatgtttatagcgatatcgattatagtgatacaaacaaagattatttcttcgtttttggaaaagaaacgactggattgccagatgcgcttttacaagagaatgaagaaaattgtttgcgtattccaatgactgaccatattcgttcattgaatttatctaatacagcagcaattttagcttatgaagcgttacgtcagcagaattttggtgcacttttacaagaaccgaattacgatcgaaaaatttttcaagactaagggggagttaggatgaatcaggcgatagatgccattctgggacattactcagtgcgaaaatttgaagacaaggacttaacggaagaagcgttgaccttacttatcaagagtgcacaagccgcatctacatccagttttgttcaagcatactccatcatcggaataacagataaagatattcgggaacaaatctcagccattgcaggaaatcaaccatatacagtacaaactggacaactatttattttcgttgctgatttagctcgtcatcacgccatcttagaagaacaccaagtagacacagcggcactggaaacttcagaaaaatggcttgtttccgtcatagatgcggcacttgctgcgcaaaatatggctatcgcggcagaatcattaggacttggtatttgctttattggcggtattcgtaacgatgtcgaacaaatcgccgaaatactggatttaccaccatatacgatgccgttatttggtctaacaattggtcatccagttgctaacaaagaaaaagcgaaaccgagattacctcaagatttggtatatcacgaaaatagttacaaaaaaatgaatccagaaactttagcagaatacgataaacaaataaaaacttactacaatgaacgaacagcaggtaaacgagtagaaggctggtccgaacaaattgcccgcggacttggaagaccaagccgtttagatttaaaagcatttttagaaaaacaacatttaaatcaaaaataaaagaacggtacggcgcattatcgtaatgcgccgtaccgttctttttcagttatttacgtttatttctagccatttgaattaagttccaaataacgagtattaaaacgattactagcaagatattaattaatccacccgcaatatggaaaataattccaagtaaccaaactgctaataaaacaacgattattccccaaataattcctaacatatataaaaacctctttctgcacttttgattgtactcttatatattcccgtgagatcagtctttaaacatatttgggataaaaacagactatttttttgtaatataggctaaaagagctttcactccctcagttaccatgcgctcggtttcatcaaaatcaccagtataataagggtcggggatatctttatcttcttgacctgagacaaaagacatcagcgaacgaatgattacatctggattgttattaagggcatttaaatcagctaaattttgctgatccatcccgataataaaatctgcttctttaaaatcagcatcagaaatttttcgagcacgcatcgcttggtaatcaacaccatgctttttcaacacttcctgcgtcccgcgatgtggaggcttacctaaattccacgttccagttgctgcagaatcaatctttatttcatccgtcagcccagcattagccacttcttttcgaaataacccctcagccatgggggaacgacaaatatttcctaaacatacaaaaactacttttaccaattgaattcctccttagttccattctttatataattcagccacagtcactttatttattccatcacacgctttaagtcggacgaaaatttgctccacaagctcaggtacgagttttcttcggaaataaagcaattgattttcaaataaactacagacaactaaattatacgggatttcttgtttttcaagtaatcctaaaagtgtctctaaataccactttttatctggataatcttctaatagttccagtaactgttttgttttttgaacattactagcagcaagaatttgatttaatttttttatcggaaaatgttctgccaaatcaataggaaaagggctaaagtacagtttctctaaaaatgcagcaagattttcagcaacaacaagtgtttgtaaagtttcaaaatcaacataaataatacttggttctgacgtattatccatataagaaaaaccaagatagcgcgattcatcccggtgaaagtaaacttgctttcctgcgagctcaacatctttttgttctggaatatccgttaataattcatccaaacttcccaaataatagatctcgccaaaatccagcccgtaagaagtaggttccgaagtcgggaaatgatttttgcgaatcaaaccaccattttgcttcaatagcaattgtttatagtcagttggcaaaatcaagccaatctcagtttctttttcatgtatagtttgttcagttgcgcctttattttcgttttccacccaaatcgtcatcttcttcaactcctccctgtattatcctaaaaaaagcgatatagcgcaaacaaaagaacatagctaggaataattcctaactatgttccaaaatatcacttcaaaagatcttgataataactattttcattccgcgcatcaaacttcgccgttaaagtttccgtcatttccaccaaatcagcttctttttcccggtcgaaaagagaataggctgcttgtaggaataagagacgatccattccgctttctgcttgaagaacaatttccttatgcacatcaagaacttcgcgtgctttttctgtttggtttgtcttcactagatatttaagcaaatagctgagtggttggattaaggcgatctgtttttccacaagtggataacctttatcgaagcattcttgcgccatctccgcatcaccaagttccaaataaacaagcgccatatctccataagtataatgagggacttcggcacaggctaattttccattaataatcggggtagctgtttccttggctttttcataatctttaatgaagtaataataactggcttgagcacatgtttcgcaagcacggcagtcatttaaatgatcagcttctgtgttattccatttaacaaagaattgtttagctttttccacttcacccatccacatagcatcaagcgtacaaactttataataagggcgcagtgagtaattttgctgctcgaatttcagcttcatatcctctaaaagcctgttaatttgtgtttttggtatttcatcaaatgtagcaatctgttcgctaatccatttataattccaaaaaagatcgaaggtgtctacagaagaatcgtcgtcttcccattttttcactaaccaactaaatgctttcagttgttttttaggaaagccagccgttaaacaagtttctatcaataattccctggcttcaacagcgctttcgacatcgttatacatatcggcacttgcaatagcttgttccaataattttactttttcagaagtatcgtccattccccaagcttcttctagtgcattcaaataatccattgtcatcctccaatagcattttgtaaaacttttagtaagcttctaaacgattttgataataattattttcattacgagcgtcaaacttcgccgttaaagcttccgtcatttccaccaaatcagcttctttttcccgatcaaaaagagggtaggctgcttgtaagaaaataagacggtctaaaccagcctcggcttggagaacgatttccagattcgtatcaaggacttcacgcgctttttccgtttggtttgtagatactaaatatctaagcaattggccaagtggcggaattaaggaaatttgtttttccacaagcggataacctttatcaaaacattcttgcgccatttttgcatcgcccaagtctaaataagcaagtgccatatttccgtaggttaaatgagggacttcagcgcagcgctgtttcccatcaataattggtttcgctttttccttggctttttcataatcttgcacaaaacaataataatttacttgatcatttctttcacaagcagggcagtcatttaaataatctgcttttgtagtgctccatttgttatatagttcttttgctttttccacatcacccatccgcattgctgcaagagtacatactttatagtaaggtcgtagcgaataattttcttgttcgaattttactttcatatcatttaaaagcccatcaatttgagctttcgaaacttcatcaaacgttggaacatgttcgctaatccatttatatttccaaagaagatcttctgagtcaatatagacatcgttatcttcgtcttcccatttgctaattaaccaactaaaagcttgtagctgtttttttggaaagccgacagttaaacaagtttcaattagcatatcgcgagcctcaatgccactttctacatcattatgcgcatctgcaccagtaatgattcgttctaaaactttaattttttcaggtgtatcttccatgccccaaactgtttgtgtatcatttaagtaatccatcattttgcctcctatagcatctctaagattcgtaacatattttggttcattaataccatttctttccgtttaagcggataatgccctaatagtaaggcttggatataaagtacattcacaatcacagacaattctttcactgttttttcagaagtgaaaagtcgtttaatcagctcattatctaaatttaaatacaagtgagcgagcggggcaggttcttgttctttttgaatgctctctaaaatatcactgaatacggaagttgtttcttctactgcgcgttctagttcgcgtaactcttgtgttgccgtagaatggatgaaaataattggtaaatcttttggctcaaaatgtttgattaacacatcggtgtcaaactcagccatcatactattcatttctgtcaaaataggttggtacgcttgtttttcatccgctgtcattggacgtaatttatccgtcatttcttccggctggattaaaacaaattcagttccttccacaaaataacttaactgcgctaaaattggcgagtcgtaggaataaccaccattaataagtgtcatgccgcttgatctcgcaatatccttaatttgtctaaaatcatcgaccgagtaagtgtaatagatgacgtcatttttagcgataatatcacctaatttttcttcgccatttaaagttcgaactggaagataaggataaattaattttaaaaatggtgcatcttcactcgcaagtgctttaaaaccaagataatgtgtagctaataatttcatcagcgcttcttccggaagagtttcaattcctttttttaaagcaacgccaagctcacttgcaacactagttaaccgctcatttttataaaatgcttcacgggaagcaacgggttgaagttcatccgtccaaatcacgcatttagcaaaaaatgaccaatctggtaaaatattatttgcttcactggtgacaaacatcttatttagaaataccgtattttttcggatagcattcatttgaacagcatgtggaatcatataagcaataccaaacgttcttcctgactcattttcaattaagaaatagtcttggaaatgcgttccaaggatatattcgccgtactgaataatttgttctctcgaaagtgttgacaaggtttctttatcagaaaactgtttggtccaactattaatttcttcctctaaaccattcatttctactattatattgctttccaaagaagcaccatattttttcagtgtattgattaaatattcgacgtcctcacattcaggatgatcttctaaaccggcgcgtaaacgtaaatacacttgcgtaccaggttcgcgagtgtcagtttctattttgcgaacggaataagtaccatccgcttttccgcgccactcggttgtgccgccatctttttgagaggtagaaatcattacaatttcatcactcacgataaaacaagaaagtaaaccaatcccaaaacgaccaataaagtcattggaactttctccatcaaagtttttttcgccttttgatgaattagcaatagtagctagaaaagcgtgaacctcatcttccgttaaaccaatgccgttgtcttctataattaatgttttttcattattatctccagttagagatgcatggattttaccttctaaagttgaatcaatttttttcctagcacgaatggcatcggttgcattttgcagcaattcgcgaatataaacatctttttcgtcataaaggtggtttgagagaatgtcaatcataccagccaagttcacctgaaagcggtgagaataattttccatagcttgggcctcctagttgtctaaaactcttttttattctatcataaaagagaagataaataatgagaaaatggttatagatgtttaagaaattttatcagtggtaaatactttgtgatggtttccacactggacattgatgtggaaatagattatacttattattaagtgataatcattataaaataggaggaagataattatgaaaacaatcaactcagtagacacaaaggaatttttgaatcaccaagtagcgaatttaaacgtattcacagtaaaaattcatcaaattcattggtatatgagaggccacaacttcttcactttacatgaaaaaatggatgatttatatagcgaattcggcgaacaaatggatgaagtagcagaacgtttactagcaatcggcggaagcccattctcgactttaaaagagtttttagaaaatgcgagcgtagaagaagcgccttatacaaaaccaaaaacaatggatcaattaatggaagacttagttggaacattagaattacttagagacgaatatcaacaaggtattgagcttactgacaaagaaggcgacaatgtaacaaacgatatgctaattgctttcaaagcaagcattgacaaacatatctggatgttcaaagcattcttaggaaaagctccattagagtagagagtaataaaaactgtgcgggattaatcgtctcgtacagtttttttgtctctaactgttatagtacaatattcttattttttagttgttttaacacaatgtggtttgaagtttctttgaaagaggtatattatcttcataacaaaaagcagaaaaagtgaaattcaccaagaaatctgctattcttgaataacaatcattacgaaaaaattggaaacgaggagtgaaaagtatgaatatcgaggtaacggaccaagcaaataaatggtttcatgatgagtttgatgtagctaatggtaatggaattcgactttttgcgaaatacggtggttctaacagttccttgcatcctggtttctctatcggtttaactgccgaaaaaccgcaagaagcagctgtagctgagaagaaagaagacttaattttcttcattgaagatcatgattattggtatttcaaagaccacgactggaaaatcgactatgaaccaaaaacggaagaagtactcttttcctttaaagaaaaagtgaaatgaatccaacataaatgaccgcgtgtaatcaatttgattccaggcggtttttgttttaaaaactttactgtttcgccttcctttgctattctactaagagagcaggaggagaaagatgacaaagaaattagtaatctgtataagtttaatcgcgatatttttaagcggttgtagtttttccgaaccatcaacgagtaaatcgaacattactgaaaaaacattgaacggtgcaacttttacattttttgatgttggacaaggtgatagcacacttatccaagcagaagatggcacaactattttgattgatacaggtcgccaagacgatgaccgtattttaacctatttaaaagaagcgaatgtaaagaaaatagatttgttgctattgacacacccgcacgcagaccatattggtaatgctgataaagtaatagctacatacaacccaaaagaaatttggatggatggtttaactttttctagtagtatttatgagaaagtaattgacgcggcattagcttcagatgcaaaatacaaagaaccaagacgcggcgaaaaagcgacttttggtccatttaatctagaggttttaagccctgataaactggaaaatgacgcaaataatgattctatcgctgtaaaaatcacctataaagatatttccgctatttttacaggtgacgcagaaaaaggccgagaaagagaaatggtagatagcggtgccaatttagaagcggatattttagatttagggcaccacggatcgtccacatccaaccagccatttttcctagataaagtaaaaccgcaagtggctgtttactctgctgaaatggctaatagttacggacatcctcatgtggaagtgctggagtggttaaaagagcgtgatataaaaacatatggaacagatgtgaatggtacggttattatcgaaaccgatggtgaaaaaatccatgtgcaaactgaaaaatcaggtacaccaaaaccaggtagcagttataataaagaaaatagcacacaaaaaacagaagatgcaacatccgaagaattaccagaaagcattaatttaaatacagcatctagtgaagatttacaattattaccactaattgggccagcgcttgcagaaaaaatcattgccgagcgaccatatcagtccatagatgacttgaaaaaaattaacggcattggcgatggcattgtgcgccaaataaaagaacaaggcattgccgtaacaaagtaggtgattaggatgaaaaaagcaattttagatcggatagaagatggcaaagcagtttttctattagaaccagaccaaacagaatggcaaattgacaaagaaaagctcgattcatccataaaagaaggggatatcgtcactatttcagaaactaatgaaataatgaaacatccccaagaaacggaagaaatgaaaaataggattgcagaaaagctagaaagattaagagggagaaactgagaaaaacttttttaaactctcatgaaattatcatctttctttcagcacattcttttttagaaaagttattatatgtataagctaacaacaagcaaaacattttcatttctttccctttttagaatggaaatcccaaactcccttttagctagtgcggtttactccctttttccgcactagtttttttatgcgcaaaaatcactttttctgagagaagagaaatttattgcgtccagcatctaggccgcagtatagcataagcatggtaataccgactaaaacatataaggtcggttgccaactaccaagcgcatcgtgtagggtaccaaataatattggaccagaggcggcaaataagtaaccgatagattgtgccattccagataaatccgctgattctgtcgcgcttgttgttcgcaaattaaagaacatcatcgacaaactaaacgacatccccgagccaattccatagataatgatagcgatggataaaataagtatgctaccagaagcaaacataatgccaaaaatcccaattaaaaagaataaaatagaaattccaacaagtaattgctgatttttcattcgtccggcaataataggaataataaacgtaatcggcataaccgcaaactgcattaaggaaagcattaaaccactagaagtactagataacccttggtctgctaaaatatttggtaaccaggcaatcgaaatataaaaaattgctgactgcgaacccataaataaagaaattttccatgcgagcggagatttccaaaccgaagttgtaaccaagtgagttgcaattttttccgtcgagcgttgattatattttagttgtggaagccaaatgactaaagcaacgattccaagaattgcccagaaaaccatacttccatgccagctaaagcgattgttcatagcaattggaaccgttaagccagctgcaattgctgcacacaaattcatcgaaatggaataaactccagtcattagacccaatttaaatggaaattctttttttatcaaacttggcaaaatgacatttccgactgcgatagcaaggccaatcataaacgttccagcaaataaattaagttcgccaccaaaaggtcgaagtaagctaccaagtacaagtgtcaaaagtgctacaaaaattaatacttccataccaagtgctcgacttagtttagaaacaaatggggatagtcccgcaaatgcaagtagcggaatcgttgttagtaatccagccattgtattggttaaatgtaaatctgattgaatcattccaagtaacggacctacagaggtaataggtgtacgtaagtttgccgcaattaaaacaattcctaaaacaagcattaccttactcgaacgtgtaaggatttttttattggttaaatctgaattcatttcttttctccattcttagcagcaatccgtttgaaaagagtaatatactctgttacttcatgagctgcttgttctttatttcgtttttcaatcgctttgacaagcgcagcatgccctttatgctgattagcttctgggctcatttcggttgtactcgtgattgaaaactgtatttcttctaaaatattgacatacatatctaacaacaaatcgttatgtgctgtctttacaattgttaaatgaagggcagaatcagctttcacaaaagcgcctacatcatttttttcagtcgctagttggcattgttgtctatatttttctagtgtttctacatcttcttccgtacgtcggtcgcaggccagaataaccgcttctctgtcaagtgcatgccgaatttccaagatttcttgaaccgtggattcgcggacacgcttctgcatgatagcatttagttcactattgttacgaacaaaagtcccgtcaccttgtttggtttccagtaaaccgatatgagctagggcgcgaatagcttcacgtaacgtattacgactaatgccaaattcagccattaaatccgcttcttttggaatacgctcaccaattttccacgtaccattagtaatttctgcttttatttgatcataaacttgctctgcaagcgattttcgttcaattttttctaccatactattcactccatttctaaaggtaggatgattggttctattttacagaagaattctttttttgtaaaccttattttgttaaactatgataaaatgaagaaagaaaagggctggtgaggatatgaattggttagaaaaactaaaagaaaacgacactgcaagacgggtgctagtgtttgtccttctaggcgttgttttatatttactcagaagtatgattgatttgattttactaacattcatttttgcatttttagtaacacgactagagaatgttattttgaaaagggtgcgcgtaccaagaaagctaattgtcattgtactttattcgctagtagcagtattcttatatgtcgctatagtgcatttcttaccaattttaattaatcaaatttctcaattagtagattctcttgtgaaactttacaataatccaagtgacaacacgattgtgaagtggattgttgggtttttaaaagaatctaacatacaaaaatatttacaagctggggtcgattttattatcgcttcactttccggtattggatctgtcggattgtctttcttcctagcattaattcttagtttatttttctctttggaaaaagaacgagtaacttcttttactgggcagtttatgacaagtaaggtaggcttcatttttaaagaggctgcgttttttggaaagaaatttgtttcgacttttggagtagttttagaggcgcaattaatgattgctttagtaaacacatttattacgacaatcgcgctttatttaatggactttccacagttgcttagtttatctattatggttttcgtcttaggattaatcccagttgcaggagtgattatttcctgtattccactggtgcttatagcttattctgttggaggatttcaagatgtggtgtacattttaattaccgttgtcattgtccatgcgattgagacgtacattttaaatccaaaactaatgtcatctaaaacgaacttaccggtattttacacatttattattttgattttctcggaaacattctttggagtgtgggggctaatcgtaggaattccagtttttgtattcttattagatattttagaagtgagaaatgcagaagacttaaaaaaacgaacgttatttggacgcaagaaaaaagtagattaggcgatagcttaatctactttttctattccccataaaaaatcagctacttcggcatcaacattggtgttttcgtggagtttactatgagctgcatttttccctgtgaatgttttttcttcgtaacttgctgcctggccttcaaaaataaatttgccagataaggcgctcgcaacagaaacactaccatcgctttttgttccgtttaaagtatcacctgcaatatttaatacgtgcaaattagtagggattttttgtttgtttttcatgaattcactataacggtctgaagatttttttggccctgaatctgtaaggtcgtaagctgtaacaccatcatcaccaattactagtccattaagcggagcgccgattaaaacaagtttttcaagaacaggataagttttatcattacctactttttcaatgtaactcgttaaactaacgccacccatggaatgaccaactgcgtatactttttcgatatgataattattttttaattctttcatgacattttgaatccattgtgtttgatttgccgctgagcttttattatcttcaaaaataacttgaatagtagggttatgactaaacttatcatagtcacccttagagcttacagtcccatcagccgcaacattcataacaagtgattttgttacatccccgtcttcagcaaggcgattaatcataccgccgaatgaatttgctgttccagaatacccatgaacaaacagggtagggatggctatttctgaaacagaattttgttcttttgttgttgttttatttgctgtcacggtaggttctttagcttcttttttagtcggctcaaattgaagaaaaattatccagaagcccgtaatgataacggctaatgcgataattaaaataataacttttttcattcgaaacatcctttaatcgtttatttctcgccccataaaaattgaccaacatatttatccactacagtagattcatgcatactactatgagtagcttgtggtcctttaatgacatgtgtcgtcaccttttgatgtgcaaataatttttcaccatataaaacactgtctaatttcacttcaccatcactatttgaaccatcttccaaattaccaccaataatcataatttctgtattgttgggtaaaactttggccattttctcagcgaatttagcatgtacattattggcgtttttaatatcaacctgttgatcaccatttacatattcttccggataaaatggtactgcaagaaacacaattttatttacttgtggataggacttgtttttttcgtaactagctaaatacgaaacccaagcgccaccccccattgaatgacctactgcattaaattttttaattgcataattttgttgtaaataagacattaccttttttgtccacatcgattgttggggaagcgtcgcccgattatcttcaaaaacaatgttgataagtggatttttttcctttttgttataagttccagtagtagaaatttctccatctgggcttacatttacggtcaatgactctgtaccccaatcatacttttggtcaaagcgacgtatcattccgtgaagcgagcggtctgtcccacgataaccatgtataaaaatggttggaatggaatcattggctgcttttggataagtcgtgttaatcgttagtaaaataaaaattgctccaactaaacaacctaatggtaagataatggagaagaacacgcgctttagcattattttacgcccctttaaaatttgttatgaacaaattatacattttttttatggaaaacgcacgattggtctactttttctactaatttaatggtttcttctcatgaaaacatatagtatactggaaaaataagcgaagaaacggaggcatattcagatgattaaacgaactggtgagatagtactcgctattattggtcttgttttaagtctactcgcacaagcatttattgctattattggtctattaatgataagcggttcaaaaggaaaggaaggtttaacaactttctacaacaactactacaaaacaatgactgaatgggaaatcccgaaaaaagaggttcctgatcccgatcgtgtattggattttgtgcaaacattatcttggacagcattaacgggaggcttaattacgctcgctctaggtatctttgggatttactacatcttcaaaaataaaaaaccagtttttgcaggatatttatttttagcagcaggcgttgtatcgttgctttctacagcactaattagtttcattcctgcgttactattcattgttgctgctatactttgttttgtccgcaaaccgaagagcactttttctggattataattcgaaacgagtttgaatttttcaagctcgtttttgttttacttctacttttttagggaataaaatagtggatttcaagaggaggttgatagtgtgaaaaataaagtaggaattattgccggagccgtgggagctgtcgctggagttttagcttgtgcagcggtatacgtggtaaaaaagcaacagccgcccaccccttttgatgaggtaaatgatattcggacacgttatgctgacaaagaaatttccgaaacagagctggaagaaaacaacatgatttcagaaggtggcgtttcatctcttcaatatgaagaaaagtaaaataatgagaatgcagtttgtatcttgtgttacgcgagaacaagctgttttttttatgtagaaaacactgcttattatagtagattatgttatcctgtagttagacaataggactcaagttgtaggtgaatttccttctacagcgggttattatacttgatagatagggttatgataggtacagtaataaaagaaaatatatcagctacatttggaagttaggaggtaggtgtatgagagcaatattgattggcgtattaataattttactaattgcgatgatacttatagtcttattgccagcgatactagcaatggttggtgcagtgctcggcttttggtcacttaagaaactacttgaagcaaggtccgtaggtgaaaaagttatttatggtgttctaattggcgttggtgccttaataattctagctaacttaaaaggaattctggttgttgtaattatcggagcaatcatttacttcctaactagaaataaaaataaaccaagaaaaaatgatgacgtattcgactacccatacaataaataattggaggagaaaaaaatggcaaacctttttgaaaaaatgaaacaatggaataaagaagttagtgaaaaaatcgagaaacgtgaagaaaaacgtcgcaattcagtaagttactatatggataaaacaaaacaagaaatgaaagacgcagaacgcatggtagaaaaacaacgcgaactgaaatctcttttctataaggaatataaagaaatggaagtttatgttgaaaaacgtcgtcaccaagcagaaattgcaaaagaagctggtgaaacaaaactagctgatttcgctttagaagaagtggctcaatatgaagaacaattagaagctacaaaagcacattacgatcaagcgtccgaacaacttgaaaaattagaactacgcatgcacgaaatgcgcttaaaatggaaaaatcttaaaacccaacatttagcggaaatggctgaaaaaaatgcaacagaaacttccgaaaaaatggacaaagttatccatgacatgagctggggtagtgttagtgactatcatgaagcacaaaaacaacgcgatttagctgaagaagcagaaaagaaagcagatatgagcaaagaactttctcaatccttcgatgatctaatggatgaattagaaaagaaaacaaagaaaagtaaagaaatcatcaaagacaaagcgcaaaactttacaactatggtagatgaaattattgaacgcgaaaaacaaaatttcaaaaaaccagaaaaagcttcgatggaagatcaattaaatgaacttgaaaaagaagctgcaaaagaaaaaccaaaagaagaaaaagaggtcttaattccagaattagagaaaaaagaagaagaaaacgaaacagataaataaaagtaacgagcgcagaataattattctgcgcttttttataactaaaagctacaggccatctaaatatgctcgtagcttttttggttattttactttttttcgggtaaataggaaaagataagttgcattttaatagatacatgctataataattggtatagaccgatttaacaaggaggcaatatgtaatggctaataaagtaattactaacgctacaatttatactggtaaaggtgttctagaaaatgctttcgtacgttttgataaacaaattttagaggttggctcgatggctgattttcaagcggacaaagcagaagaagtaatcgatgcaaaaggacaaaaacttgttcctggtttcattgatgttcattcacacggtggttatagttttgacgcaatggatgcagatccagaagcacttagaaaacaagtgaacggaatgttaaatgaagggattactacttacttcccaacaacgatgacgcaatcacacgaaaatatcgaaaaagcgctaaaagtgattaacgaagtcgcacaaacagaacctgttattggtgggattcatctagaaggcccatttgtttccaaagtctttaaaggagcgcaaccagaagaatacatccaagcgcctgatttggaacttttcaaaaaatggtttgatatttctggtggcttaattaaattagtaacatatgcaccagagcatgatacttctgctgattttgaaaatttgtgtttcgaactaggggttgttccaagtattgggcactctaatgatgtgcgtgaacacttgaaaacaagtaaagcgacacatgcgacacatttatataatgcttgtcaccgtatgacacaccgtgagccaggcgttccaggtcacgttttactagaacgcggtattaatgcagaactaatcgttgatggtattcacgttcatcctgatatggtgaaattagcttatcaaatgaaagggccagaacatttatgcattatcactgactccatgcgagcaaaaggtatgccagaaggaaaatccgaacttggcggtcaaactgttatcgtaaaagataaacaagctcgtttagaagatggaactttagctggaagtgtgctcacttatgacgacggcttccgcaacatgattaaatttactggatgctcggtagaagaggcagttcttatgtcttctggaaaccaagcacgcgaatttaatttaacacaaaaaggtgcaatcgaggctggtaaagatgcagatttcaacttactagacgaagatttacacattacagcaacttattcattcggaaaaaaacattcttgagaggaagataataaaatgcaacttatcacaacagaaaataaattagcaggatccaaaaaagcgttagaaatcattgaaaaaggcattacatcaggcgaagtaaacacacttggcctagcaacaggaagcacaccagaaacactttatgctgaacttgtaaaaagcgatgttgacactaaaaatgtaacaacaactaacctagatgaatatgtaggtcttgcggcaagcgacccaaacagttatcattactatatgaacgacttgttattctctaaaaaagcatttaaagaaagtttcttaccaaacggagaagcgacagatgctgaagcagaatgcgcacgttatgaagaaattttatctgagcacccaattgatattcaagtgcttggaattggaacaaatggacacatcggttttaacgaaccaggaacttcttttgattcgataacacataaagttgttttaacagattccactcgtgaagctaacaaacgctttttcgaaagagaagaagatgttccaacacatgcttattctatgggaattaaatccatcatgaatgcgaagaaaattatcctactggcttttggtgaaaacaaagcacaagcaatcaaagaaactattaaaggacctgtagatgtgaattgtcctgcttctgttcttcaaaatcatccagatgttactgtgattcttgacaacgaggcggcgtcacttctataagaagagggcggggaaatgatcgataaacaatcaggaataccgatttacattcagattcaaagtgaaattaaaaagaaaatggaagatggtgtctggaaagttggcacttctattccagctgaacgtcagcttgcagaaatgttccacgtcagccgaatgacggtaagacaagccattcaaggcctcgttgatgataacattttgcaaaggcgtgttggtgccgggacttttattgcggaaaagaaactaaccgaacgacttgaagcggttacgagttttacgaatttgatgttacaagaggggaaagttccttcgacgcgaatcgtatcgtacggtattcgtccggcaagtacgcaagaacaagaggcgttgcaactaccagaaaacagcaatgtaatgaaaattgagcggattcgttatggcgaccgcgttccaattctttatgaagttgcggccattccagaaaaaattgcttcactgcttacaaaggaagacattatggattccctttataaagcgattgaattaaaacttggtcaaccaattggagaagcggaacaaatcatggaagcttctttagtatcagaaaaaattgcgccatatcttgatgtgaaactcggatcaccggttatgaaacttaggcaaattacaacgttagaagacggtcgaccatttgaatttacgcgttcccagtatgtaggtagtagatttcaatttgtagctaggattaaacaataaataaaagcttgaggcggaatctgtctgccccaagcttttttgcataatgattttcgttgtctttttgcaaataaaaaagtataatgagatgagtaaaaaatttgcggggaggactagccatgagctggatgattatatttatatgttttggcgcgtccgtattacttacaccgctaattcgaaaaatagctctatactttgatattacagataaaccagaccaacgtcgtattaatattaaaccaattccgagtttaggtggactagcaatatttatcagttttactatcggaatgtttttactcccaattgaaaacgaattcttatggccgcttctgattgcggcgtttgtcatggttttgactgggctattagatgatattatggaatttaaagcaagatataaattaattggccaaatcactgctgcctttattattgtattttggggtaacattagcatcgactttattaacttaccatttggtggggaaattcattttgggatgttaagtattccgcttacgattatttggattgtagcaattacgaatgctattaatttgattgatggactagatggccttgcagcaggtgtttcaaccattgcactacttacgattttaggaatggcgtttattatgggagatgcactagtaattatgatagcaagcgtgttaattgctggaactcttggtttcttaccttataatttcaatcctgcaaaaattttcatgggtgacactggcgcgcttttcttaggttttattatttccgtgttatctgtgatgggattcaaaaatgttacgtttatctctttaattgtaccgattttaattttaggagtaccaatttctgatacgctttttgctattatacgacgcatggtaacgaaacaacccattgcgatggcagacaagtcgcatttacatcattgtttattacgactagggttcacacatcgtcaaactgttattttaatttatgctatagctgcactattttcattattcgccttcattttcacgatgtcgacactttggggttcgatgattttaatcggtgtgctgctcgtcttaattgaggtattgattgagacacttggattagtagggagctcctatcgcccattacttaatttatttaaattaacaaaagaagaaaaaatagattagagattggtcacttagactagtctctttttttgtgccaaaattcttattgagtaacaagtcttcttgtgatacatttatcaagtaacgtttttgtagaaatgaggagaaaaacatggaaatcattgcgacagcagattcaatgaaacaagctgaacaattgcttcgcgcgggggtagacagactatatataggtaatagccaatttggtttaagactgccatattcgttttctgtcgaagaattacgtgaaatagttcatttagcgcatcaagaaggaaagaaagtaacagtagcagtaaattcgttaatgcataacgagcatatggaaaagttaccaggatttttagagcaacttgctgatatggaagtggatgcagtaacgtgcggcgatccaggtgcaattatgcttttgagtgaaatggctcaaccgattccgtttatttatgatgcccaaacatttgtaactagcgcagaacaaatctcgttttgggaaaaacaaggagcgattggcgcggtacttgctcgggaactaacagaaggcgaaatcaaaaccatcgcgcatagccttactatcccagtcgaagttctagtttatggaccaacatgcattcaccaatccaaacgtaaactagtaacgaattatgagcgtattgttgaaatggaagatgatacatcgaaggaacgcggtctttatttacgcgaacctaatgatgaaacaagtcaattaccaatctatgaagatgagtctggaacacatatttttgcttccgaagatgtttcgcttgttccttatttggcggacttatatgaggctgggttgaaaacatggaaactagatggtgttcttgcagaatcagaaaattttgttcaaattgcatcactgttagttgaagcgaaagaagctactctgaaaggtcaatttgttgcagagtattttgtgaataaattaacggagcttcagcctcaaacacgaaaactagacgcaggattttatttgaaaaatccggatgatgtgaaatagggggattagcataatgagtaaaatattaaaaaaacctgaagtgctagctccggctggtaacttagaaaaattaaaaattgcgattcgctacggtgcggacgctgtatatattggtggacaggctttcggacttcggtcacgggcaggtaattttagttttgaagaaatgaaagaaggtatcgcttttgcgcatgaacgaaatgcaaaagtgtatgttgcagcaaatatggttgcgcacgctggtgatacagaaggtgctggtgaatttttcctaacattacgcgatattggtattgacgcagtaatcgtttctgacccagccttaattagcatttgtttccaagatgcaccaggtttaccagtacacttatccacacaagcttctgcaacaaactataaaactctagaattttggaagaaacaaggactagagcgtgttgttcttgcacgggaagttagcatgcaagaaattcaagaaattggcgaaaaaaccgatgttgaaatggaagcatttattcatggggcaatgtgtatttcctactctggtcgttgtacattatcgaatcatatggctaatcgtgatgcgaaccgcggcggttgtgcgcagagttgtcgttggaaatatgacttattcgagattgataatggcgtttcaaaaaatttagtggatacagatgaagagccgttttcaatgagtgcagttgatttatctatgattaaatacattccagatatggtagatgctggtgtggatagtttgaaaatcgaaggacgaatgaaatctattcattatgtttcaaccgttgcaagcgtatatcgccgtgccgtggatgcttactgcgcggacccagaaaattatgtgtttgacccagcttgggaagaagaattgtggaaagtcgcgcaacgcgaactatctacaggatttttctacaaagaaccaaccgaggacgagcaactatttgggaaaacgcggaaaattcctcaatatgcttttgcggcgcaagtactggaatatgacgagaaaacgaaaatcgctactttacaacaacgaaataattttggtgtaggggaagaaattgaattttatggaccaggagatactggctttaagcaagtcgtagaagtactttggaacgaagatggcgtagaaattgaccgcgctccaaatgcaatgatgacgataaaaatgccggtagataaacctgtgaagccattttactttatgcggaagaaaaaataaaaatctcatgctgcagtaggattgtcgtgtactccctaagtaaggtataatggggtaagtacatatgaaggaggagattaattatgataggatggattattgctatcgctgttgttgtcattttagtattgatttatttcggtctatacaacagccttgtaaaataccgtaaccgtgtggatgaaacttgggcgcaaattgacgtgcaattaaaacgtagatttgatttaattcctaatctagttgaaacagttaaagggtatgcaaaacacgaaaaagagacattgacaaaagtaattgaagctcgtaacaaaatgatggaagtccctgctgacaatcgtcaaggtcaaatcgaagctgacaatatgttaagtggagcgcttaaatccatttttgcattaggagaagcttatccagatttaaaagcaaatacttctttcatcgaattgcaacatgaattaactactacggaaaacaaagtggcttattctcgccaactttataatacaaccgtaatgacttacaacacaaaagtacaatctgtaccaacaaacatcgttgcaaaactgcataactttacagaacgtgacatgctttctattcctgaagtagaacgcgttgcaccaaaagtagagttttaagccatgaaggagagcgaaaattatgctatttgaacaaattgcagcaaataagcgaaaaacaatttttattattcttggctttttcattttcgttcttatggttggcgctgctataggtataattgtttggaataactatctgaatgggcttgtactcgcggctgttattggtgcattttatattttgattatggtaatgagcagttcgtcggtcgttatggcgatgaatcatgcgaaggaagtcacatcaaaagaacaagcgccagttttgtgggataccgttgaaagtatggcaatggttgctggtattccgatgccaaaagtatatatcgttgaagatccaagtccgaacgcttttgcgacggggatttctcctgaaaaaggagccgtggcggttactagaggattgcttaataaattagaacgttatgaacttgagggcgttattgcgcatgaaatttctcatattcgtaattatgatattcggttatcaacgatcgccattgcgctagtggctgttattgcgattcttagtgatatagcaatgcgaatgattttctggggaagcctaactggtggcagaaataaccgtaaaagtgacaataataacagtggcggggcacaagcgattatctatatcgttgcactcatatttgttattttggcgcctattattgcaacagctattcaatttgcgttatctcgtaatagagagtatttagctgatgctagtgcggtagaattaaccagaaatccagatggacttatccaagctttacaaaaaatcagtggtgattcgaaaaaaatggaagaagtgagtgcttctagtgagtccatttacttttcgtcacctctaaagtcaaaaaaaaataagccaggtctttttgactcacatccgccaattagttcgcggattgaacgcttagaaaatatgtaaaaaaagaagcaacccaggaatgggtgcttcttttttataagtttccgatgtatttccagtgagactgtccagctggagcatcgattaattctactttttgttggagacgccatttcttcatttggcgctcgatttgttgttcggaaacaccataaaaatctgccatagaagcagaagaagtaacttttacttttgctaagtattcttccatttgcgggcgttcttctggttgcggggcatcatttaaaagctcggataaaacatgtacataaacttcgtaacgatgaagtccacttagttttaatccggcatcttctatatttttattgaaaaagactacagtagggttttcatgaatttccatttcttgagctactttttgatcgccgatataagcacgtttggcaactgtagaggctagatcttttttgaattctgataaatctagaccagtggagacagcaatatcatagagtacttcatcactagcgatatctttattttcaaggaagtaggctgcttgaatcttgcgcaagaatgtaattccttgtttttttccttggagttcagcggctttgactgcaagacaagaaatataggaaaggtgcgcccctatttgttgttcttttaagcttaggttactatttcctgcacgcttttgtttacatacaaatgtctgcaaattgttatgcagaacatagcgcaatttgaaatagttcccgtactccatttgtaaccggagcatgttcgcttcgatattccaacagtcatcacaagctggatcgaagaatagataaatttcgatgggcttggaatttgctactgactgataatataaattttggttaatcatttgctatcacctgattttcaaattctaaatatcttcaaacagatactcatttcaatgtaccagtgtgaaaagaaataattcactgctcagtaaaagctgatacaaaatttggttttgtaacttatatatctattttatcagcgtaatgtaaatttaacaaataattgtcattggcttaacatatttattcgttattttttaagaatttgtgtctttttgctataaaagtatctatttttacttattattttcatatacgtgatgataaaatcgtgctactttattttcggcaggttgattggtgatttgatattctttaagtagtttgtcaaaaacctcttttcctttgtcataatcagacacttcatactctaagtcgaaatctgatatggagccataaaaattcttatcaaacacaagtaagccttttttataatctttttctgcgcggattgttttgagtgaaccgaaaacttgtaagtcttcatgattgattcctagttcttttaacgtgtcacgaacaggtccaaccggaatatttgctccagagatgatcgcacttgcttggtcctcgccaagaatttgagtagtttccattagtccacgtgcttctggggttttgagtgttaattggtactgtgtttctaattggcgaattcgaagagcagaatgacgttcttttaacccgaaatttgttgtgtctaaataataatttgtttgctcaaagaaatcgtcttctttcactcgaaaattttctattaatgtatcgtattcttctttggttaatagattacggaattcgatttctaattctttgaccataaaaattcagctccctttaatgaaatgtcgcatctaaatcttgcgcataaaattgaattgcttttttgtaacttaaaatgtcttcatcactcgttgtctgtgtcaagagcatcaaggcttcctccaaagcttctttttctaaaccttgattgtacttagccatcactgaaaaagtacgcaaggcattattatctggaaattcttgtaaagctgtttcgaaaaggcggatagatttttcgggctgacctgtaatacggtaagtgctaccgagacctatatacgcttctttgcgagaatcagcaggaagaccaagctgaagagctttctcgtaaaaggggattgcagcatcttctttaccgagtgcatcgtgcgcccatgctgcataataatgaagttctgcgttatcggagttgttttttaattcagtaagagcttgagtgcgcgcagtttcgtaatcgccgttttgaagtaatgttagaatcattttcgtcctccttttagttgtcgtttgagtgcttcggttttattttaccacgggattgaaaaaaaggttactttaagcaaggtggattaactgcttttgtgttaaaataaaactgatgttgcataaatttaatcatgaatatacttgaggtgagcgatttgaatcattgggaagactttttagcgccttacaaacaggcagtggaagaacttaaaattaaacttaaaggaatgcgttcacaatttgagcttgaaaataatcattcgccaattgaatttgttacaggacgagtgaagccggttgcgagcatactagacaaggctaatcaaaaacatattgcgctagatcatttagtagaagaaatgcaggatattgcgggactccgcatgatgtgccaatttgtagatgatattgaagtagtggtgcgccttttaagacaacggaatgattttcgaattgtagaagaacgcgattatattacaaacaagaaacctagtggttaccgctcctatcacgttgttattgagtacccagtggaaacaattcaaggagaaaagaaaatcttagctgaaatccaaattaggacacttgcaatgaatttttgggcaacgattgagcattcggtaaactacaagtatcaaggcgaatttccagaagcaatcaataaacgtttaaaacgcgctgctgaagctgcttttcaattagatgaggaaatgtcgcaaattcgtgaagaaatacaagaagcgcaagtttatttctctcaaaataaagacgtatcaaaggataaaaaagcagtgcatcaagtgatgccaaagaaaaataagtaattagttgtaggaataggggcgaatagaaataatgaaatatatgattacttccaaaggagacgaaaaatccgatttgctgcgactaaatatgatcgcaggttttggggaatatgacatggaatatgatgatgttgagcccgaaattgttatttctattggtggagatggaacatttctgtctgcttttcatcaatacgaggagcgcttggatgaaattgcctttatcggaattcatacagggcatcttggcttttacgcggattggagaccagctgaggctgataaattggttaaacttttagcaaaaggagaatatcagaaagtttcctatccccttctcaaaacaaccgtgaaatatgggattggcaaaaaagaagcgacatatttagcgcttaatgaatcaactgtaaaaagttcaggaggcccttttgtagttgatgttgtgattaacgatattcattttgagcgatttcgtggagatggcctttgtatgtcaacacctagtgggacgacggcatacaataaatcgctaggtggggcacttatgcatccttctattgaagcaatgcagttaacagagatggcatcgattaataatcgtgtgtaccggacaatcggtagcccactagtttttccgaaacatcatgttgttagtttgcaaccggttaatgacaaggactttcaaatttctgtagaccatttgagcattttgcatcgggatgtacaagaaattcggtatgaagtatctgcaaaaaaaattcactttgccagatttaggtcatttccattttggcgtcgtgtacacgattcgtttattgaagattaagctagcaggaggaagcatgtgtttttagaatggaaagtcgaaactgaagaagatgggctcttacttcgcacgtttttaaagagtaagcatatttcgaaacaattattaactgccgtgaaatttggggcagatggaaaaattgaagtgaataacgaagaacaaaatgttttgtatcacgtaaaagtaggcgataaagtgaggcttacttttccaacagagcaacaaaatgaacgattgcttgcggaatataccaatttagatattgtttttgaagatgattttttattaattatcaataaaccggccgggatggcttccattccatcacaatatcacccaaatggatccgttgcaaattttgtcaaagggcattatgaagcgcaaggactgacgaacgctattcatattgtaacaagactcgatcgtgagacgtcagggttaatgctaatcgccaaaaatagatttgctcatgctagattaagtacgtttttgcaaaaaggattgctaaaacgacgctatcaagcctttatatcaggagttttagtagaacaaaagggttcgattgaagcgccaataggacgcaaagaagtgagtataatggaacgttttgttactcctgaaggtaaatatgccaaaacaaattatgaggttctcgcgcgctatagagcatttgaccatgtagctattcaacttgagacaggaaggacgcaccagattcgtgtgcatttctcttatattggacatccgcttattggcgatgatatgtacggaggagatacgaatttgttgaaaagacaagcactgcactcatgccatctgcatttagtccatcctttgacagaagaatatatggcgtttgatctacctctaccagcagacatggaagagataattcaaaaatcgaagtaataagtgttttaaaaagttatttggtcatgtaaaatggaagaagcgaacaaatcgcatcaattttaggaggaaagaacatgaatttatcattagagggaaaaacttatgttgtaatgggagtagctaataagcgtagtattgcttgggcaattgcgcgttcactaaatgaagctggagcaaaactggtatttacatatgcggacgatcgtgcgaaaaaaagcattacagagctagtaccttcattaagcgaagtaaatcaaaatccacttatcttagcttgtgatgtaacaagtgaagaagctattacagaaacttttgaaacaattaaagataaagctggcaaacttagcggcctagcacactgcattgcttttgcaaacaaagactttttaactggggactatttagaagtagatcgtaaaagcttcttacaagcacatgaaattagtgcctattcatttacagctgtagctcgtgcactaaaacacttggaaatgttaacagaagatgcaagtttactaacgctaacttaccttggtggggaacgtgtagtagaaaactataatattatgggtgtagcaaaagcttcccttgatgcaagcgttcgataccttgcaatggatctaggcgcaattggggttcgtgtgaatgctatttcagcaggaccaatcagaacagtatctgctcgtggcgttagcggtttctctgattctatttcactagtagaagaaagagctccactaaaacgtgcgacacaagcggaagaagttggcgatacagcgtattacttattcagtaatttatctcgaggcgttactggtgaagtaattcatgtagatagcggttatcatattattggattttaaagaaaaaaagaccgtaagtagtttttactacttacggtctttttttggtccattttctggatgttctttaaagtaatattcttttggtgttggtttatagtttgtttgaattggttctttaacgaagtctgctaatacttggtcgatttttacccaaccacgccagcttaaatgaatcggatcttctaagaaaaaagcgtcattttgatattcttctagagagtagtaacggaaaccttgactctcaatttgttcttttgttttcgcataatagtcatctaaaccttgtttgtccataccaatgtaatcaatccattttccattgataggcgggttaatgaaaatgacatctgcaccagcctttttgaaagcatccatcagtagctgtaaatcagcaaactcaggagattggtcataacgtaaatctttgcggctattttttaatttaccttcaatgggtttgattttcttttggtaataatgttctttgacttgaaaaggattattaccagtacttctctcaccagtttctttagctaattcatctagttgttggtaatctaaagtttctggaagttcttttaggcctttgcttacgcgatcttgtttggaaccaatgatgtattttgattctaaatcgtctttacgttccaaaatcttcagttcgacattaccagtaatgtttagaagctttggatcatgaggttttttaggtccttttgcgacaatgttttcgagtaatttttttaatgtagagtcactttgaactacttggaaagataataaacgtttagctgcataacgacgttcaggcgtgtttttcgtatcttctaaagcaaatttatatgcatgaagaggggaaaagttggcaccaaatgatgggtcagaaacccctttaggttggaaccattgtggagataaaactaccgctactttttttccttttaaatcatcaccaagtgcatttacgtctaagaaatgacttaatgattgtgtacctgggcgaccaagtaaaaatggagtatagccctgattgtatttttttgagactacgctaggatgaaatgggtcgacgcgggaaagctctgaagaaccataaattggtaaatagtttccttcttgtaaagcttttttctggatgtctaagccttggatgacggattcgttcattgatgtagcgcttttctctacggtatcagaagaaactttagagaataagctactaggtccgaatagaacgaaaaggaaaaccgcgaatgcgaccaataaaggcccaaatgtcatccacagcttttttttcattattttagcgcctcaagttgtgtaataatcatttcaggagtagcccattcgtcgcggtcaaattcggaaacaggtacagtaatatctagtttttcttcaatttcaattaaaagttgaaccgtagccatagaatcaagcaagccttcatcaaataatttgatgtttgtattttgtactacttcatcagtttctgtaatttcctctaatatttctaatacattttcacgaaaagccattataaattaccacctttagttagttttaaaaattaattttatctaaaatacctgagaatatcaggaatccgaaacaaacaaattggaatgtaatgataacgccgattacataagtaattttgttttttggatagaatttgtgcttcttgttaaagcgttcgaataggtcaaatccaacgataagtgttgcttgataaaggccataaacgatgtaataccaatgaagtccatgccatactcccatgatgaaaaagttaacgaaatatgctaggtaggcaatagtgaacttgcttttaaaccatttcttttttgtaacccaaaatacgaaacgcatgaatacataatcgcggaaccagaaagaaagcgtcatatgccaacgattccagaactctttaatgttgcgagctgcgaaaggtttgttaaagttcataggtgtttgaacgccgagcaagtaactaaccccaactgcaaaggcactataacctgcaaagtcaaagaataaatacatactataagcatacatataaccaattaaactctttgttgtatctacattatgtgtaatcgcgatgtctagtggaacaacaaaatgtttgtttactaagtaagcgataatgaatttgtagagaaaaccaaggaagataaggaatattcctcgatttaataaagctagataagcttctttactaggcggattatcaacgtcttttttaaagcgacggaatcggtcaatcggtccggacgaaatagtcgggaagaatagtaagaagttaacaaaatcccacgcgttatactgtttaattaagttatcacgtatttcaataatcatttgtgttgctttaaatgttaagtaggaaattcctaggaaaccaaccattgttacatgatcacctaaaattggaacaactttagagataacgagggggagaatggacagaatcactgcgataacaaaaacgccgccgtgattccgctttttctcttgcctataatggaagtaaagtcgtacaagggcaagttgccagaagacgaagaagataaaagtagctccttggactggacttgctgagaacataaagtataaaaatacgagtgtcacaaaagcattataaatcggtaatctcttccctaacaaaccagctactatgataggaatcaaaaatagtacaagtactccaaaataaagaattgtgccgtatggtaaactcacttgttaacctcactattaagtgatttgcgatcaattttgccattcatagttaacgggaagtccgttttataaatccattttcgggggatcatgtatgctggcataaattcttttagttctttttttattgctgcacttagctggtattctttttcgaaatcatgggtagttgggatgacctgagcgactaacatatctaccttttcatctttcattttcggaataatagcgcagttttgaatgtaacttactttttttaggttgttttcgatatcttctaattcgatgcggtaaccatgaagtttaatttggaagtcaagacgtccttggaagaacagataaccgtctttgataataccagagtctcctgtgcgataggcttgataacctttataatcgaagaatacttggtctgttttttcaggttcatttaagtaacctttagaaacgctagcaccaattaggacaatttctcctttttcgccttctggaagaacctcaccagtttcttggtcaacgatgtgtaaacgcatatctggtttaataacgccaagtggtaagcttggataagcatcgataatctctcgagttactttcacttgggtaacagccacggttgcttctgtaggtccgtatgtattgtaaataactgcatctgggaaacggtccagtaattcgcttgctgttttcttggcaagtacttcaccacagaataagaaacgagttaagcgggggttattttcttggttaaagttctcgtctagtaagcacaaatctgcaaaagaaggagtagaaacccatacatccaagttttgagcaggtatttcacgatatagatctttcatattcgcagtaattgttttatcaagaggtacaagcgtcccacccgatagtaaacttgggtataaatccataacggatagatcgaaggagaagggcgcttggtttaagaaacgcaatccttggcttaaagaaaagtcttgtaaaatccagttactaaaacttactaggttgttttgactgatttgaacgcctttaggatttcctgtacttccagatgtgtaaataatatagtagttatcatcattgtttacacatgcttctttgtctggaacttctccgaaatgtttttctaaagcgtccattagctgatcttgtgttagcaccggacaaccagtaatagtaaggttgttaggcagctcttctgtgcaaataaacatagaaggatcagctgctttttttatttgttctatacgttcaactggcatagaaacatctactggtacataagctcgacctgatttgatagagcctaagaatgcaactaacattaggggagacatatggccgtaaacgataataggtttttctttgtcagtaattaggttttttagtagaaaagagccgaatgcatcagattgccgttttagttctttataggaaagacgtgttccagcatattcatagcaagggaaatccggtgtcttctctgcccatgcatcaattctttctatgatactcgttgtcattattgatattcccatttttaacagtcctttcttcttttagaattcgttgtaaatgaatttcgcaccttcagggtttttgaaaccataaaaccaaagcaatccaagcaaaatagctaggtagaaaaaagttttcattgtaaaaatagttgctggatgatgcaaaattagttttattttattcataaatccacctcttcattgtttcatttgtgttacaaatattaaaaataaacgtttaatacttacttactgtaatacatttgtctttaaatgtctaattacatttttgtaaggttagaaaaataaacatattttgaacttgaaagtaggtacgagtataatgaaacaatagatatagcaatgttttaatgctagaaaagaggttggactatgattaatcaaaagaagattgcaggagaaaaggcttgtgaatggattaaagatggaatggttgtgggtcttggaacgggcagtacagtttattacacgattgaaaagcttggagaaatggtaaataacggtttgcacattacaggggtagcgacttctgaagaaacaaacaaacaagcacaaaatttaggaatacctttgaaatcgctaaatgacgttacggaaatagatattactattgatggtgcagatgaaattgatacggattttcaaggaataaagggtggaggaggagcactgttacgcgaaaaaatggtagcaagtgcgagtttgaaaaacatttgggttgtcagtgaggagaagcttgtaagaaacttagggaagtttcctttacctttagaagtaataccttttggttggaagcaggttgagagaaaacttgaaaaagagcatattcaaacaaatttacggaaacaatcttcaggagaagtctatgtgacaaataacgggaactatattttggatatagtaaatcaaacttttacggatgcagaaatgtggcaagaaaaattagcgcaaatcccagggattgtggagcatggattatttcttcattatgtggatataattatttgtgcgaaggcgaatggcgaaattgaactaataaaaaaatagttatttcttctatataaaagaaataactatttttattaaatttcataggttaatgtttttttcatgtctttatgttcaattccagcatcaaggaataatcccgagcaagtttcgtatcccaatttttcatagaagggaatagctgttacctgcgcgcctaattttaaggtagttaagccacgagacttagcttcggattcaatggcttccatgattctccggccgctcccagtaccgcgggctactttctgggtgcagatgcgttcgactttaccataaccatctttttcgcggaatctaccggttgcaagtggtgtgccgtcttctgcgtaatcaacaaacatcacaacagaatctatttcatcaaattcatcccattctaatgctggatcaacacgctgctcaacgacaaaaacatcatttctaattttaagtgcagcttgtttgccaatatcatctgttactttctttacggtcaagttgtttccgtcctttcctatgcgcgcatgctttctaaatcaaatgtattcactggaagcatatattgtaaagaatctttgataaatggctgccagtatttccagcgatgatcgccgttaaatacatggaaataataatcaaatccgcgagtggttaaaatttgttctaaagatttatttggtgataggaaatcgagcacttcatttccggttgtttcgactgcagtttcttggtcaccaataatatggaagattttcacttttgaagggtctactttttctgcaagtgtaaggattgtgtcatccacatagggggaatgtaaaatcacattaccaaatgtaaaaggaaaaagaagagctgcctttaaagaaacagatgccccgagtgagtctcccatcaagaatctactagtaggcatttggaaagaaggaaagcgttcttcaagataaggaacgagttcaaatgctaagaatttgatatatgcatcgttttgtttaccatccggatgatatttttcgcgacgatccataacagttttgtaggggataccaatgaaaatggctttttgaatctgctcatttagcgctaattcttcggagtggcgcgcaagtttgccaaactgaaaataatcttttccatcttgtacaataaaaagtggatatttgtaaagtggcgaaaaatcaggtggcaagcaaataattaaatcaagttcctctccaagcgatttactataaaatttctcatccaacattttgttagctgtcattttcattctctcctttcttgaaatcattccttcattggttattgttttttgaaaagttactctattttagcatgaattacgttaaaagaaagaacattttgcctatttatttgaaaaaattttctttttcacaggacatcactgcaataatgctatttaatatgctatactgaaacatacaataattctgttttaatgatagaaagtggggattttgaatgagtaaagatattgactggagtaatttaggatttagttatattaaaacggacaaacgttacatttcttattggaaagacggagaatgggacgaaggtgcgctaacagaagacaatacgctacatattagcgaaggttcgacagcacttcattacggacaacaatgttttgagggtttaaaagcatatcgttgtaaggatggttcgattaatctttttcgcccagatcgaaatgctgctcgtattcaaaaaagttgtgagcgtttattaatgcctcacatcccaactgaaaaatttattgatgctgttatgcaagttgttcgtgccaatgaagaatttgtgccgccgtatggtacaggtgcaacactttatttacgtccatttgttattggtgtaggcgataatattggtgttcatgcagccccagagtatattttctctgttttctgttcaccagttggtccttacttcaaaggtggaatggcgccaactaactttatcgtttccgattttgaccgtgctgctccaaatggtacgggtgccgcaaaagttggcggaaactatgcagcaagtttacttccaggtcaggctgcaaaagaacgcaattttggtgattgtatttatttagatccagctacacatacaaaaatagaagaagttggttctgctaatttctttggtattacaaaagatgataaatttgttacaccgtattctccttctattttgccaagtatcacgaagtattcgttactttatttggcagagcatcgtttaggcttagaagcagtagaaggcgatgtatatattgataaattagatgagtttaaagaagctggagcatgtggaacggcagcggttattacaccaattggcggtattcaaaccaaagatgatttccatgtattccatagtgaaacagaagtggggccagtaacgaaacgtttattcgatgaactttgtggtattcaatttggagatgtagaagctccagaaggttggatttataaagtgaaataatatcaaaccgtccgttcagcgggcggtttttttgtgaataaaaacaaaagtcatttcagatgaaaaaaagaaatgacttttttattgacacatccgcaactcggtgttactatgtagtagtaataagtaatacagaataccggtgttactgagtagtggggttttaataaaaaatggaaagaaggttgtattcaaatgaaagaagtgatgattaaggccactggtttggaaaagtcatttaagaaaacggaagtcttgaagggtgtagattttgaagtaaaacatggcgaaatttttgcattactaggctcaaacggtgcgggcaagacgacaaccatccaaattttagcgactcttttaaaagcggataatggaaatgcgcatatttcgggttttgatgtgaaaacggagccggaaaaagtacggaaacatattagccttactggacaatttgcagcagtagatggacttttaacaggacgagaaaatattttactcattgctaaactacgtggtgaaaagaacccggcacaaacggcagatgacttattggcacgttttggactcgaaaaagctgcggatcgacgtgcagacacttattcaggaggaatgacaagacgactggatattgctatgagtctcgttggctccccggatgtgatttttcttgatgaaccaacaactggacttgatccggaagggcgaatggaagtctggaaaacgattaaaacactttctgatggaggaacaaccattttactaacaacacaatatttggatgaagcagaacaacttgctgatagaattgctatccttcatggcggaacgattatcgcaaatggaaccttggatgaacttaaaaaattattcccacctgctgaagttgaatatatcgaaaaacaaccatcactggaagaaattttcttagcaattattaatgggaaggaggaagtgaaatgaaagccgttcgtgatacaagtatattatttggtcgctccatgcgtcatattatgcgtagtcctgatacgattattactgttgctattattccaattatgattatgttgatgtttgtgtatgtgcttggaggtgcaattcaaacagggacagacaattacgtagattacttgttgccgggtattattttgatggcaattgcaagtggaatagcctatacggcggtacgattatttacagatgtacaaaaaggattatttcaacgatttcattctatgccaattagtcgatcttcggtattatggggacatgttttaacttctttagtttctaatgctatctctattgtgctcattattctagttgctcttcttattggttttcgttcatcggcgggaatagtggaatggcttgccgtagcgggtatcttgctgttattcactttagcgctcacatgggtcgctgtgattcctgggttgacagctaaatcagttgatggagcgagtgccttttcttatccactcatatttttaccattcattagttcagcttttgttccaacggatacgatgccaaccgcaatacgagtttttgcagaaaatcagcccgtgacagctattgttaatacgatacgtgcattgctgtattcagaaccaatcgggaatgatatctggattgcacttgcatggtgtgtaggaattaccgttgttgcctatgtttttgcagtaactatttataaaaaaatggtataaaataaaaaaggttggctccgcagagccaaccttttatttttcgccggaaatatgttttttcggtaagataaaatgaataaaataactaacgatacagcaagcaaacattacccagaaaaccgtatgaagcccgctatataaaatatctcgaagtggatcaacaaggtctgtactaacgttacccgaagtttgtgggctaattaattggtttaaattactgcgattcacttcactgccagctgcggcgcggaactcgcttgtaagaactgagttgaagatagttccaaatacagccacaccgattgtttgaccaactgttctaaaaagtgtattagaagcagtagcaataccagtttggaatcgcggtacagcatcttgaacagtgactgttgtcgtggtaaaaattatcccaaaaccaaatcccataaatgcactatttaaatagaagaagatgtcatttgtggaagcggggaataaggctaaaattaatccacttgccgccgtaattaaaacgccaatgccaaccgtatgccgatttccaagcgtcattaaaagtttgccgccgataaatgaaccaattatccatgtaaccgaaagcggtgcaagcataaatccagcaatcgtagccccgtgcccaagcattccttgtgcccacattggaatatacacgttaatcccaattaggaaggcactaatcaagaaaccaattaagttcccaattaacaccactggatttttaaataatacaaatggcataatcggatcttttgcacgtttttcgacaaaataaaaagcaataaataacacaatcgaaacggcaaaaagaataacgacgagcggttctgtccagttgagcgattccccggctcgctgtaacgcaaataataaaccaagtagtgccacggtaaagagcgaggcacctaaatagtcaatcggtaatttcacatgttccactttttcgcgtaaataaagcaaaataagtaggattgtcaaaatgccgattgggacattgataaagaaaatccaatgccatgaaagttggtctactaaaaatcctccaacaagtggtccaaatacaccagcgataccccaagcggaacccatgaagccaagtacttttgctcgtttttcaaatggatacacgtctgcgataatcgtcatagtagatggtaaaatcccacctgctccaataccttggatcgcgcgaaaaataattaattgttccatattttgtgcaaatccacaaagtgatgaaccaataataaaaataattgtcgcaatcacaaaaatattttttcgtccatacaaatcagacagttttccgtaaatcggaaccgtcactgctgatgttagcaaataaacagaaaaaatccagttcattaactctatgccgtccaactgacttacaatcgttggcatcgcagtactcacgatggtaccctcaatagctgccataaatgttgcgacaaatacggcgatggtaacggcttttacttttgtttgttccaaaaaattccctcccttttcgtctaccgaattatagcatataaaaggactaatttgggaaaaagttaatcctaagaaatgcgcacattcaagataagcgctataatataatagaagaaagcgaactaaaggaggaatttttttgtcatacgaaccaaatacaaaagaaaccatgcaaaaaattaaagaattaacatctatcccaagcccaacaggcaacacagggaaaatcatcgaaaaactggcaaaagatttagatgcttcaaaaatcccataccgcttaaacaataaaggcggattaattgtaacgcttcctgggaaagacgaaacgaaacatcgtatgctaaccgcccatgtggatacgcttggagcaatggttaaagaaattaaagcagacggacgattacttttaacgttaattggcggctatcgttttaatgcaattgaaggcgaatattgtaccattgagacaagcgctggagatttgtatagtggaactatcttgatgcaccaaacttctgtccatgtgtataaagatgcagggactgctgagcgtaatgacaaaaatatggaagttcgcttagatgtaaaagcattagatgcagacaaagttcgtgctcttggaatagaagtaggcgatttcgtttcctttgatccgcgcgtgcaaattattaatgatgaatatattaaatctcgacatttggatgataaagcaagtgtcgcgattttattacaactaatcaatcatattcacgaaaacaacctggagcttcctcatacaacccatttcctaatctctaataatgaagaaattggctatggtggtaattctaatattccggctgaaacagtggaatatttagctgtcgacatgggggcgcttggtgatggtcaaacgtctgatgaatacactgtttctatttgtgcaaaagacggaagtggcccatatcaccttggtttgcgcaaacatttagtggagcttgctaaaaagaataatattgattataaagtggatatttatccgttttatgcatctgatgcgagtgcggcgattaatgctgggaacgatattatccacggtttgattggaccaggaattgatgctagtcatgcatatgaacgcacacaccgcgattcactttatcatacagaaaaattagtttatgcatatttattttcgaatatattgaaataggaggaattccatatgaatgtccatgatttttctgaaaaagcaatgaacggcaaagaaatagctttaagtgattataaaggtaaagttttactcatagtgaataccgcgagtaaatgtggcttaacacctcaattagaaggtcttgaagcaatgtataaaaaattgggtggagataattttgaaattctcggtttcccatgtaaccagtttttacgtcaagaccctggtagtgatgaggaaattttagaattttgccaaatgaattatggtgtgactttccaaatgttttccaaaattaaagtaaaaggcaaagatgccagcccactttataaatatttaaccgaacaaactggtggtaaaaaagtagaatggaactttgcgaaatttttaattgatgaaaatggagaagttattgaacgtttcccatctaaaatgaaacctgaagattttgaggataaagtggaagcacttgttgcgaaagtaaataattaagggagactcggtaatgtcattgcggcactaccgagtttttttgcatcttagttagttaaaaatgcatgttactgaaatcagcttgtagtttttgacgtgacgtttataataaaagaaaaagggaggcaaccagatgaaattccatgtgaagcaaaataataatttagcagttggtgaagtggatgtgtattgccatcccgataatttagaagaagtaacgaacatcgtaatgggaatagatgagccaacagaaaaaatctctgtcaaaaaggacggcgccacttatttactagaaccaaaagccattttatattttgaggcagtcgaaagtaagatttttgtttatacggaaaaagaaatatatgaaatccattggaaattatatgaattggaagaaaaattcaaagatagttcttttttcagatgttcgaaatcaatgattttaaatatcgaatggattgaaaaaattgctccgggttttcacgggaaatttgaagcgaaactttttaatcgggaaaaagtgattatatctcggcaatacgcgaaggtcttaaagcaaaaattaaacatgggaggtaagcggaaatgagtactaaactaattcaatttatacaatcagcatgcattattttttctgcctctattatcacgatgatctgctcttacatcgcaactggagaatcagaaacggtcgcaatccgggatatttttattatgcttggttttagcattgtgacaacgttcattcaacaattattttttaataattcagtgaaaacgaaacttgctttttatagtcgtttgattgctttcttcctctttattggcgcagcgattttagggcttgggtggttgctggattggtatcataacatagctgggtttatgattatttttggctttatttgtgtgactttccttgtgatgcatattttcttcagcttccgtgatgtgaaattcagtaatgaaattaatcaaaaactagcagaaatgcgagaaagggagacaaaatgataaaattgaccaatgtagttaaaaaatttggcaaaatcgaggcagtcaaagggattaatttagaagttgaaaaaggctcgttatttgcttttctaggcgagaatggtgctggtaaatcgactacgcttagcatgatttgtacagaaagcgaacctacttcaggagaaatttatattgatgatgaaaaattgacatttaaaaatcgtaaattatttagacaaaagctaggcgtagttttccaagaaaatgtgttggatgacttactgacggtgcgcgaaaatttatataatcgcgctagtttatacgggaaaacaaaagcagaaattacggaacgattagcgctagtttcttctattatggggattgaggatattttaaatcgtcgctttgaaaaattgtctggtggtcaaaagcgtcgcgcggaaattgctagggcaattatgcatgatccagaaattttgctgctagatgagccaacgaccgggctagatccaaaaacaagagtgagtgtatggaaaattattgattatttgcgagaagaattaggaatgacggtgtttttgacgacacattatttagaagaagctaaagatgcggatcagttagctgtaatccataaggggaaaatcatcgcgcaaggtacaccaacaaacattagaagccgtttttctgtagataaaattttcttttacgatgcgaaggtagcagaacttcaaaaaataatgaaaaaagcaaatttaccatttaaagtttctaaagcaacgatgcgtgtggatgtgataactcaagatgtcgaaatattggctattttaaatcaagcagcgggactttatggttcttttgaagtgattaaagggaacttagatgacgcttttatttcgatgattaaggaggagtccgatgattagtcgtaatttaaaaatctattttcgtgatagaactgctgtatttatgtcattacttactgttttaattattattggactgtatgcgatttttttaggaaataatatggaagagatgttcaaacaggcttctggaaaaacggtaggcatacaagaattagtgaatacgtgggtgatagcagggattttatccattacacctgtaacggtatcgttggccgttttttctttgaaagtgcatgatgaagaattaagtattgcgagaagctttgcgataacatctgcttccagatggcgtattgttattagttatattgttagtggactagttgcttctttcttgttgtctgtcataacactttttgttggggaaatgtatatttggttgactggcggagaatttttaccgtttgagagctggattcgtttaattgggattattttaattaatgttttatgttgtagcagtattatgttctttatcgccagtttggtgaaaaaagcgagtgcctttagttccgtttcgacgattgttgggactgttattggttttattgccgggatttatttaccaattggttcacttccggccgcggtgcaaacagcgatgaaatgttttcctttcacatacggagcttctactattcgagaaatcatgacaaaagagcctttgaaagaagttttcgcggggaatacaggtgcgatggatgcgacaaaagaaatgattggaattacgatttattggggcgataaaacagttacaacagggcttagtttacttattttaagtgcctttgcagtcgtgtttggtgtgttatctgtcatcctcatgaaacgacaaacaaaataatttttgaataaaaaaacagccgaaattctcctagttatgctatactaatggaatgtgaatgaatctaggaggaaaataacaatgagtcaagatttgcaaaaagaagttgcttcacgcaaaacgtttgcgattatttctcacccggatgctgggaaaacgacgattactgagcaattattattattcggtggcgttatccgttcagctgggactgtaaagggaaagaaatctggaaagtttgcgacaagtgactggatggaaattgaaaaacaacgtggtatctcggtaacgagttctgtgatgcagtttgattataatggttcaagaattaatattttggatacaccgggtcactcggatttcagtgaagacacgtaccggacattgatggcagtggatagcgcggtcatggttatcgatgctgcgaaagggattgaagctcaaacactaaaactattcaaagtttgtcgaatgcgcggaattcctatttttacttttattaacaaaatggaccgtcaagggaaaatgccactggaattgcttgctgaactagaagaagttcttggcattgaatcgtatccaatgaactggccgattgggatgggtaaagagcttgctgggctttatgaccgttaccaccgtgtgattgagcaatatcgttctgaggaagatgagcgtttcttaccacttggtgaagatggcgatttgaaggaagcgcacgctattcaaaaatcactttattacgatcaagctctggaagaaattatgttacttgatgaggctgggaatgactttagtcgcgaacgtattattgcgggtgaacaaacaccagtatttttcggtagtgccttaacaaactttggtgtagaaactttcttgcgcacatttgttgattttgcgcctgctccttctagccatgaatcgaatgaaggtgtgattgaagcagataatccaaagttttctggttttattttcaaaatccaagccaatatgaatcctgctcatcgtgatcggattgcctttattcgaatctgttcaggtgaattcgaacgtggcatgaacgttacgttaacacgaactggaaaaagtttgaaacttgctaactcgacacagtttatggcagatgaccgggaaactgttaatcgtgcggtagctggtgatattatcggtttgtacgacacaggtaattaccaaattggcgatacgattactaatggaagtaaaaagctcgaatttgaaaaacttccgcagtttacaccagaattatttatgcgtgtttatgcaaaaaatgtcatgaaacaaaagcatttccataaaggcgtagagcaactcgttcaagaaggtgcgattcaattatttaaaacatggcgcacggaagaatacatcattggagctgttggtcagttgcaatttgaagtattcgaacacagaatgcgcggcgaatataattcagaaatccggatggaaccaatcggtaaaaaaatcgctcgttgggtcaaagaagaagatgcggatgaaaaactatccaccgctcgaagcatgctcgtaaaagaccgtttcgaccaaccgttattcttattcgaaaacgaattcgcgattaattggtttaatgataaaaatccagatattgagttaacttcattactataatagctgcaacctatttgtattttcgcaaataggttgtttttttcttgacaattttttgaaacgcgctataattagttagaattctaattaataaggaggaatactcgtgagaagagagaagacgatggatacgttgattcgttcgattatgattaaatccaaacgtaaaatggatgcaaaagttgctcaatttgggctgacaacacaacaagctagagttcttggatttttaaatgataatgcagcaaatgaaattatccaaaaagatcttcagcgaatcttccaaacacgtggtgcaagtatcactagcctcattcaaggactcgagaaaaagcaattaatttcacgcaaaccaagcattcgagatggcagagaaaaagtggtcactttaactgaagaaggtaaacgaatcgtggacgaatttaatgaatccttcccgcgtgaagatgataaagcgaaaaaaatcctttccgctgacgagtataaaatctttattgatctacttagtaaaattgatgacaatacggaataaaaaatttaactatatagttagaattctaactaattttaagggggaaccaaaatgaaacactcagataattattatttaacaaaagcgagcattcctaaagcgatagcgcacttatcgattccaatgatgctcggaatgtcggttggggtgatttataatatcgtcaatgcgttctttattggtttactgcatgatacgtcgatgttgactgctgtaacactcggtttaccaatgtttacgattttaatggcgattgggaatatgtttggtgttggcggtgggacgtatatttctcgcttgcttgggaaagaggagggaaccaaggcaaagcaagtatcggcctttgttttatatggaagtttagtattaggcattctatgcgccatcttacttggctttttgattaatccagttactcattttcttggggcggatgcaacgagctttttacacacaaaaaattatacgttggcgcttctaatttgtagtccgtttattattgcgaattttgctttagaacaagtggttcgggccgagggagcttcgcgggtgtctatgaacgggatgctgattggtacggttgttaatttagtatttgatccattgcttattttgtattttgattttaatgtggtgggggctgcagtttcggtaggattagcaagcttattttcgctgatttactatgcttggtatttagagaagaaaagtgattatttatccattcgttttaaatggtttcaagcatccaaagaaatcgttcaaaacgtgtttaaaattggtgtttcagagttgctcttatcgttattcctcattgtgacaacgctcgttttaaatcattattcgatgatttacggggaaggggtggttgctggttttggcgtggcgcttcgggtggtgcagctccctgaatttatttgtatgggactttacatggggattattccgctgttagcttataattatggttcgggtaatattgcacggtttgaaaaagcaatacggtttactgctattagtattgggcttattgtgctcttgctttcgagtctggtatttatcttccgtttccaagtgatgcacctatttagtgacagtcaaagtgtgataacgcttggtgtgcatattatggttgctatgctgatatcttctcttttcagtggatttacaggactgtttacgagtacttttcaagcaattgggaaagctattccggctacaattatgtctgtttcacaaggcatcatctttattccagtcatcattttaggacaacattacttcggacttatgggcgtgatttggtccttgacggcgactgaaattcttacgtgcataatcggtgtgacactattcacaatccataatattaaaatagctagtagcgcaaaaacgaaagacttagccgtttaaaaagtttgtgagaaaaattagttgacgagaagttctatattatggtattattctctaggtaatcatatatcgttctttgacaaatgtcagaggggagtagcgctgattagctttttaatcaggataaagtcgtcattacatgatagagatatcatcggttttatcacatttaactttaaatgttagcgagacctttgcctttacgggcaggtctcgcttttttgtttcttcaaaataggagatctttgacattttaatagaacaaaggaggaaaaaaattagtggatacagcaatgattttagagtacggttgggtgttacttgtcctaatcggtcttgaggggattttagcagcagataatgcagtagttatggctgttatggtcaaacatctcccagataaacaacagaaaaaagcgttattttacggattaatgggtgcctttgttttccgttttggcgcattattcttaatttcctttttggcaaacgtttggcaagttcaagcgcttggtgccgcatatttactatatatcgctattagtcacatttggaaacatgcaaaaggaaaagacggagaaaaagagaagaaggaaaaagctggctctggtttttggatgaccgttctaaaagtagagattgctgatattgcgtttgcgattgattccatgcttgcggcagtagcccttgccattactcttccagaaacaggatggggacacattgggggaattgataccgggcaatttgcgattatgttcttaggtggacttgtcggtctaattattatccgttttgcagcaactcaatttgttaaattactaaaaagctatccaagtctcgaaacagctgcatttttaattgttggttgggtaggcgtgaagcttgttatttatacactagctcatccaagtcttggggtaattccacacagcttccctgagtcaacgctttggaaattaattttctggggtgtgatgattcttattattgtatggggatggttcgtttcctaccgtagtaagaaaaaaacagaaacaactaaataatttttaatagaccagaagtgcatatttgtacttctggttttacatacaaccagatgctgaaaacacaattttatgatagagtagaaggatggtgaatgaggaatggatgtttctatttggggcgaatatgcgttagtttttcttgttttagtagtacttgaaggaattctttccgcagataatgccgtagttatggcagtaattgtcaaaggtttaccgcatgataagcaacgaaaagccttattttatgggttagttggcgcatttgttttccgttttgttgcactatttttaatttcatttttagtaaaaatatgggaaatacaagcaatcggcgcggtttatttattgtacttagcaattaagcacatgtggcgccttaaaaaaggtaagcaagaagaagttaaagaagcatcagaagccaaatcaacttccttttggggtgtagtagctcgtgtggaattgacggatatagcttttgcactggattccatgttagctgcagcagcgttagttgttactttaccagatttagggaattttgatattgggggaatgaacggtggacaatttatcgtgatgttccttggtggtattgcaggacttgtcgtaattcgttttgcggccacacaagtggttaaattattagagcgttaccctacacttgaaacagcagcgtttttaattgttggttgggtaggtgtgaaaatggcggttctaacgctagcacatccatctgtagcaattattccaggagattttccagattcagccgtctggaagctgacattctggtcggttatgataataataggtttgggtggttatatcattgcgagaaaaaaagagaagaaaaccaaaagagtttgaatatgatcaagaagtaaaactacgcagaagattaaagcttgttttggcacgcatgacgcctgttcaagtgattattgcgtattattttctggcagtgacgatttctactatcgtattaagcttgccatttacgttacaaaaaggggtaaaggtatcgtttattgatacactttttacggcggcgagttcagtgagtgtaacaggattaacgacagtagatgtaagtcagacatatagcacggccggcatttgggtattgatggcgattttccaaattggtggactcggtgttatgatgattagtacgtttttctatttaattttaaaaagacgaattggattgaaacaacgccaattaattatgacagatactaaccaatttacaatgagcgggatggttcggatgcttcgtgagattctagtgcttattttcggtattgagttaatcggggccttgattttagggatttactttattcctctgtatccgaatttttgggatgctatgttccaaggattatataattctgtttcactcgtaaccaatgcaggcgttgatatcaccggtaaatcgctaatgccatttgcaaatgattattttgttcaatttatttcgattctgttgattattgcaggtgcgattggtttcccagtgttgcttgaaacgcggagatttttatttgagaaaaatacgttaattccgtttcgcttttcccttttcgtgaaagtaacgacgctaacttattttgtgcttttaattgttggtggtttacttatttggctatttgaatatcatcatttctttagtgggaaaagttgggatttcggtttctttaattcgatgttcttatcagcgacatcacgaagcgcggggttacaaacgattgatagtggggcattatcgatatctacgttgttacttgtctcattcttaatgtttattggagcatctccaagttctgttggtggtggtattcgaacgacaacatttgcgattacgattttatttatttattcggttatccgaggtcggaagcatgtgtacatttttggtcgtgagcttcatcaagaggacgtgcggaagtcgcttgcggtaacgttagtagcaggatttttgagtatttcggctatagtggttttaatgcagacagagactgcctcgttaattgccgtcattttcgaagtgttttcggcatttggtactacaggactttctgtagggttgacacctgatttatctacgccaggtaaaattattattattgcattaatgtttattgggcgcgttggtattatgtactcgatgctaagtttaagaaataaaaaccaacctaaaaatgcgattcgtttaccaaaagagaaaattattactggttaaatataaaagccattctggttgcagaatggcttttttgtccatgaaaaaacctcttgatcagagcgaccaagaggtgatttttaatattttgattttggaacagggcgtctgaaaatacccattaaaccagttaaagtgattaaaattccggagataatccaagcagttccgataacgaagaagagtacgataccgataattactaagataacaccccaaccacgtggagctgatttgattagaagggaagcaattaatgcaactacagatgcaattaatgtaatccaccctagatttgctaactcgttacctaattcaccaggtaaataagtaaatgtttgtatataatctgtgactgaatctccataattaataatccaaaagccaactagaatcccaatgatagagccaattaatccgataataatttctggttttcttgaacccataatacaacctcctttttctatctatacgtttaataactttcccgttttgttaagcggctaaacacatctcgcagcatagataccctaagttcgattaccggttgaacgaatatttttaccaatcgactcgataataataccgttaaaacaaaagtaacgacgaatagaagtaaaaatgtcgacgggctatattgaaagtcagtctggctaccttcacgaaaaaacttaataaagaagccatgtaacaaataaacatataacgtatttttaccccatttagtgaaaaataacctctttctaggaataaaactgaaaaaagctgcaatcgaaccaaagctaatcaaatagacaagcgcgcgaatgaatagccctagcgacttaacttccacaaagtttgcataaggcttagaacctaaaaaccacttatcatttaagttaggatgaagcgtgataaaggataaaagtaaaacaatgaaaatgcccccaagaatcatgacaaaatgcgttttaaggtagtaaaaatgctctttctttaaaaaatagccaactaagaaaaacgggaaaaaaacaagtgtccgagataaactcaaataccccccaataatatcaaaatagccagcaaccaatccaacgaagagagcaatgcaaatcgacttccaaggcttgatttttgcaaaaataaataacattatattccagaaaaacaaacttagtaaaaaccaaagtgaccattcaggatcaagcaattggatagaaagattatctttacttagaagaaaataataaaaaatactataaattagctgaaaaaatacataaggtaaaataagctttttcatcgtcttttttaaataaccaggcttaccaaagcttttagcaaaaaaaccggatattagtacgaaagccggcatatggaaggtgtaaatgtaaatataaagtacgcggacgccagcataatccgcgataaatgtttgaagaaaatggccgaaaacaactaagaaaatcaaaataaacttggcattatcgaaataactttcccgctttaaggcggattgtgtcataaaaaaacagtcctctctgatctaggttgacatactattgtttattttaccctgaattctgtaacgcttatccaacagttaagtaacaaaaagtatcaaatattaacaacggatgacagctatttgcgaatttaagaggggcgtgctatctttaggacaataaatcaagcaggaggagcgatgatatgctaaaacgtcagaaagcatcgccagtcggagaattatttataactattgaagatggctgtattatgaatatttcgtatgataagccaagaaattgggagcttctggatgggaatataatcgaaaaggagctttttcaagaattaatgatccaactagcaagttattttgaaggcgaaagagagaattttgatttgccgatgcttctaaaaggaaccgattttcaaaaaaaggtatggcaggcattgagtgaaattccatatggcgctgttgtcagctataaagatattgcaatttctgcggggagccctaaagctgtacaagcggtaggacaggcgaatcgtgctaatccaattcctatcattattccatgtcataggtgcgtgaaaagtaatggggaacttggtggctataacgggacagatgttgataaaaaacaatatttacttgcattagaaaaaggcttgagtttaagttaactcaagccctttttattacgctgttacttgttctgttatggtgatttctttgttatcgtttagagttgcaacgagatttttcgcttctggttgatcaattaaactgtcagcaatagtatcttccaggtgctcttggatagtccggcgtagtggccgtgctccaaatttaggatcataaccaagatcaatcaaatgttcttttacttccttggaaacatcgattgtcacgccttcttgagcgagcatttcatttaagtcaacgagcattaaatcaataatttgtactaaatcgtctttttctagtgatttaaattcaatgacgctatcaagacggtttaagaattctggtttgaagtatgcgcctaatttcgcaaggatgtcagagcctttttcaagtttagtttctgttgttgtattaaagccgacagaagcctctgtatctgtcgcaccagcattacttgtcataataatgactgtatctttaaagcttactgtacgtccttgtgaatcagttagtcgaccatcttctaaaatttgtaggaacatatgttgaacgtctggatgtgctttttcgatttcgtctaacaaaatgatgctatacggattgcgacgaactttttctgttaattgtccagcttcttcgtgaccaacatagccaggaggggaaccgattaatttagagatgctgtgtttttccataaattcgctcatgtctaaacgaatcatcgcttcactagtaccaaacaattcacgagctagcgtacgaccaagttctgtttttccgacaccagttggtccaacaaataggaaggaaccaattgggcgattttttgatttgaggccaacacggctacgacgaattgctttagctacttttttcacggcatcttcttgaccaattacttttccagttaagttacgttctaagtttttcattttggattgctcgtcttcttgtaagcgtcctacaggaatgcctgttttttcttcaataatcgcttgtatgtctgatgcttgaatgacagggcgttctgagaaggaattgcttgttttattttcttctaagcgagtaatttcgtcacgaactttggctgccttttcgtagtcttccatttgaagagcttgatttttttcatcttctaaacgggcaacacgttcgcttaccgtattttcgtctagtttttcaatggatagattatattttgagccaacttcatccattaaatcaattgctttgtctggcaaatgacgatcttggatataacgagcgcttaattcaactgctgctgttaatgcttcaggtgaataaactacttcatggaaatcttcatattttggttttaaaccatttaaaatagttagcgtttcttttgtggatggttcgcttacagttactggttggaagcgtcgttcaagtgcggcatctttttcgattgtgcggtattcttttagcgtagtagcaccaatcatttgcaaatcgccgcgagctaaagctggttttagaatgtttcctgcatccattgacccttctgcggaacctgccccaacgatagtatgcacttcatcaatgaagagaatcgtgtttttacgttcttgaagttctttaattagttgtttcatgcgttcttcaaattgaccgcggatacctgttccggaaacaagcgaagcgacatcaagtaagataacttctttgttcattagtttgcttggaacgtctcctgcgacaattgcatttgcaagtccttctacgacggcagttttaccaacacctggttcaccgattaggacgggattatttttattacggcggttcaatatttcaatgacacgcttaatttctttatcacggccaatgacagggtcgagttgctcgtttttcgccatatctgttaagttagtcccaaattcatctaatatgccattaccaccgccagcagtttgtgtttgtacttgtgcattagcttggcttctttgttcacggtttgcttggtttgcagcaccactcaattgacgaaaaatatcgtcaaacggggagccacttgctcctgggaactcattcgacccaaagtttgcttgatttctaacttctgcataacaagaggcacaaagcggcatttccacacgcttgccattaatattcatatatagttggattgttgctggattttgattacatttttcacagttcatatataatttcctccttttaaaaatgagaaatgaaaggtcttgactttgactatctttgaccttatgactttattatatactgacctattttgactttcaagtattttgcttactttttttataaaaaaaacgcccctataaaggaacgtttttgtgctatttttaataaattggtaaggctgcgagtaacaaaaacgcaaaggttaaatgcgataaatatagcataagtaggcttggacgataggagtacatgatattccatacgagcgaagcgacaaagataccaataatcgctgcaaaattgccactcgggaacatcattaccatacataataacgctgcaaaaacattcgagaaccaaggattaaaataatggtttaaacgttttaatacgaagccgcgccagaaaatttcttctcccgggatgatggcaacgataagtagtagccaaattatcaaagaatgcgtcgaatacttattaaaagcagcttctacagaatgttctagaccgcctggcattactttaataataaaggcgcctatgtaaaaaataatataaaggacaattccggaaaaaatacctggcaaaatacctttaacgaacgaaaactctttttttaaatcatcattaaaaatcacaaaactaagtaaaaataacatcccagctccatataaataccaaaaaacacgtgggaactgatatgttaatataacgagtagggcgcataaaacaaggcccagtacaagtttataatcgatcttgatgcttttcaaaatactttacacctcttcttaacaaatacttctcatactactttaaaacaaatgaaatcgtttggcaacaattaaacaaaagataagataaaagttgtgcaatttaataaatcctatataattaaaaaataggagtggttcatagatgttagaaaaaaactacaaatttttactttggatttatatattctggtttttaggtagcgttttgttagtatccttacacattattccaccagagctaaccgcagtccaatcgttatttttagtatttactggtgtttttgcggctgttttctttatcatgcagtatggaaagtggctcggttcagcaattacgttacttatttttgttgtaagtacttgtattgaatggatgcaactaagttatacagatgaatatattggttcgacattaggtgggagtgtttacgggattcctattacgatgggctttatttgggtcggaatggttgccgggacgcatattatcgctcgagaaattacattgaaaattaatattgactggattcgtggaggcatttactcgtttatcgcagcaacaatggtgatgatttttgaagttttaatcgaaccaatcacgatgcaatccaaacagctttacatcactcagaacggcttcacgattttgcagctgtctgattttattaattggtggctcttaggccttattttacacttaatgatttactttattttgagtttgacggatagttgggagcgcctgaaatatccggatttaaaatcagaaattgtgatcgtttattggattattatcgcctttttcgtatttttgtccttttaccttgatttatggacctctattgcgattattatcgtttccaatattattttcacggcttgttattttttcagtttggaaaaagaaacgcaaactaaaaagaaatccgaatgattactcggatttcttttctttttgtaaaaatttctgggttgcgatttgcgcattttcaataataaatggaagagagctacccgacattgcgcctgcaccaattacaaataagtttttgaatttaggcgattttttggaagggtgtaagtagccgtgctggcgccacaaatgctgtaaaccaaagatcgcaccgtgcttaacatgatatttcttttcccagtctatcggtgtgataatatattcttcttcaatttgcgattctaaatctggtatttctaaacgttctttgactgtttctagaactaattgacgaaaagcaggtgtttcttttttccaatcaatattactcgtattgttaggcacaggaaccataattcgaatactagaatgattaattggcgccattgtattatcagttgcagaaggattagtcaaatgtatagcgatatccttagagaggatttttttatgcattgtattatgcgcaaattctcggtaattttcagggaaaataattgattgatgcgaaaaaggtaacactgtttttaaaccaagataaaggataaaggcagaagaggagtattctttagtgtccaatttatctggatgctcatttgttaaagaataaatgaaatctaaattggtgaaataataatctgcttcaatagtttttccgttggcaagaacagcgccagttatttctttgccgttcgattcaaactctgtcacttcggaattgaagaaaaacttccctttattttctgtaactacttgttgcatcgcttcgacaattttattttgcccgccaattggatgaaaagttccataataatattcggaaaatggaataatactataagcagctggaatatcccacggagacatgcctaaataccgcatctgtaaggaaaaagcgaggcgaaggtacttactattaaaatatcttgataaatcatccatcaacgatcgtccaagtgtcaaactaggaatagcgcgcaaagttgtaggacggaaaaaatcaaataaagaactataattaaattgattgagcggcgaaatatatagcatttttttcgtgttttctttcataaaacggtcaaaaccatcttcttcgccaggaaagtaagtttggataaccgcttttgtctcagattgatcactataaagtggaaaggtgatatctttaaaataaagggtatgaattggattgattggtaaaagcgaaacataatccaaaatattacgattacaatccataaaaagagaagtcaaaacatgcgtcattgtgagtgcggaaggccctacatcaaatgagtatttacccattctgtgtaacgccgttcttccaccaatccgatcatttttttcatagatgtttacttgatagcctagttgacttaatagcataccggccgccaaaccaccaggtccagctccaataatggcaattttctttttactatccaaattcaaacgctcctttgccccgtttatatacatataaaaaacgcaaaaatatagagcattgtcactcggaaatgctttatttttgcgcacttaaaaactattctgttttttattcttctgtttcttctgcattttcaacttcatcgtcttcttctacagaatgaataatttggtaattcttgtggttaaccactgttttttcttcaatccctaaatctttaaaattttccatataagttaagtcgacaataacggaattttcattgagtttttcaacgattcctgtaaggccatccttaaattcaataatgtctccaacatgtgcttttgccattgttatcactccttcaattttcggtgttgcctctatcttgctgaaaaagaatgtatgcatttttgaaccttccttaaattttgcactaaaaaactattaaaatcaactataagccattaaaaagtgctatttaattcaaaacagaaacaatttagtgataaattaaaaaaaacgctctattttttctatttaaaaagagcgaaataaggtgctctacaaaaaaacattctaaaaaatttttaatcaaatagttgtaacaataggtaaaacatggtactctttttaattgagggatagtctttttggctgaaattctttcggcttaaaaggttacaacaaatttctttacaaaggagaatgtaaattatggaacaagcaagttttgtagtaatcgatgaaacaggaattcacgcacgcccggcaactctattggtgcaggctgcaagtaaatacagctctgacgttcaaattgaatacactggtaaaaaagtaaaccttaaatcaatcatgggcgttatgtctcttggtattggtaaaggcgctgacattactatctacactgaaggtagcgatgaaaaagaagcaattgaaggactaactgaagttcttaagaaagaaggattggctgaataatggctaaagagttgaaaggtatcgcagcatctgatgggattgccattgcgaaagcttatctgctcgttgaacctgatctttcctatgaaaaaacagaagttacggatgttgagagtgaagtaaagcgttttgaaagcgcgttagaagtttctagaacagaactttcaatgattcgtgagaaagctgctaaagacttaggcgaagataaggcacaaatttttgacgcgcatcttctagtgttaaatgatcctgaattaacaggaccgattgaagaaagtatcaaaaattctaaaacgaatgcagaaacagctttacaagaaacgacagacatgtttattggtatgtttgaatctatggacaacgaatacatgcgtgaacgtgcagcggatattaaagatgtgcgtaaacgtgttctttctcacttactaggtgtaactattcctaatccagctttaattgatgaggaagtagttgttgttgcagctgatttaacgccttccgataccgcacaacttaaccgtaactttgttaaaggtttcgtgacggatattggtggacgtacttctcactccgctattatggcgcgctctcttgaaattccagcagtagttggaacgaaagaagttactgctagcgtagcgaaaaacgatattgttattattgatggtttggaaggtaatgttatcatccacccaacagaagaacaaatcgctcactatgaaaaaattaaatctgattttgctttacaacaagcagaatgggataaacttaaaaatgaaaaaactgtttctaaagacggtgttcacgtggagcttgcagcaaacatcggaactccgaatgatttagaaggtgttatttctaacggcggggaagcagtaggactttatcgtacagaattcttgtacatgggtcgcgacaatttcccaacggaagaagagcagtttgaagcgtataaagctgtagtatccggaatggacggaaaatctgtggttgttcgtacattagatatcggtggcgacaaaacgttaccatacctagaacttcctgaagaaatgaacccattcttaggattccgtgctattcgtctttgttttgcgaatgaagaattattccgtacacaacttcgcgccttacttcgtgcaagtgtatatggtaacttaaaaattatgttcccgatgattgcaacagtaaatgaattccgtcaagcacgtgatattttactagacgaaaaagcgaaattaaaagctgctggaacagaagtatccgattccatcgaacttggaattatgattgaaattcctgctgctgcagttttagctgatcaatttgcaaaagaagttgatttcttctctatcggaacaaatgacttgattcagtatacaatggctgcggaccgtatgaacgaacgcgtttcttacctataccaaccttacaatccatccatcttacgtttagtaaaaatggtaattgatgcttctcataaagagggcaagtggactggtatgtgtggggaaatggctggagatcaaacggctgtaccacttcttttaggcttaggcttagatgaattttcaatgagtgcttcaagcattcttaaatctcgttcgttaatcaaacgtttagatcaatctgaaatggtgaaattagcggaagaagctttaaataaatctacagcagaagaagttgtagaattagttgaaaaatatactgcagaataatatctgaataaagacctagacaattttgttgtctaggtctttttatgttgtgaaatagcctccgcacaagtataattggaaatacagttagttttaaaagggggcaacaagattggttatctatctattagcagggttttttctgcttctgttcattgtcttgtcgtttatagatagacgacgtattagcaatgggattattttgacaatggcactatttttttctgtgctttcggtggtttatgctactttttcaaaagggaatgaactactcgtctcggttatggggacggtgttacttttattagttttacttattccgttttttgttgtagggatagcaacgatgctcattgtaaatggacgattaatgttgaaacgtgaaggacgtaaattagccaatatgcttcctttaattattggtttaggcattttagcacttattattacatggttcggtagtattttaaaaacaggtagtccgattcttgggattgtggtagtttttattgtggcattagttggttatttttcctttttatttttatcgtttcttttatcgacttttctctatcagtttaatttcccaagatataatcaagattttctgattgtattaggaagtggtctgataggcggtgatagagtacctccattgcttgctagtcggttgaatcgcgctattaagttctacgacaagcaatacgccaaaaaaggcaaacgagctacttttatcgtatctggtggacaaggtgctaatgaaactatttcagaagcagaagcgatgcgaggttatttaatagaacaaggcattgatgaaaattttattattatggaagatcaatccgttaatacactgcaaaatatgaaattttcaaaggcaaaaatggatgcaattatgtcaaactataatagtttattttcaacgaataattttcatttatttagagcaggtatttatgcaagaaaagcgggtttgaagagtcaagggattggtgcaaaaacagctttatactatatgcctaatgcattaattcgagaatttattgccattactgtaatgtataaaaaagtacatatggtcttacttggtttattactattgttttttgcgtttttagcgattataggtgttacttttagatagggggttagcctgatggagaaaattggatttgttggtacaggcgtaatgggttcgagtatggcagggcatttactggaggctggttatgaagtattggtgtatactcgcacaaaaacaaaagcagaagatttacttgataaaggagcactctgggtagaaacaccaggagaattggctaataaagtggatatattaatttcaatggttggttatccaaaagatgtggaagagctttacttaggcgaaaatggctttttagaaaatttagcagttgggacagtagcaatcgatatgacaacttcctcaccggcattagctaaaaaaatggctgaatttggccgtgaaaaaggtattggtgtattggatgctcctgtttcaggtggcgacataggcgcgaaaaatggcacgctatcaattatggtaggcggatctgaagacgtttttttaaaagtgaaaccaatttttgacattcttggtagcagtgtgattctgcaaggtgatgcaggtgctgggcaacataccaaaatggtgaaccaaattgcgattgcttccaacatgattggtgtgactgaagcaatcatttatgcggaggcggctggacttaatccatcacgtgttctcgattcaatttcaggtggtgcagctggtagttggtcacttgcaaacttgattccacgtgtacttaaggatgatttttctcctggtttctttattaaacatttcatcaaagatatgggaatcgcgatctcagaagcaaaacaaatgggcttagaacttcctgggctaactttagctgaaaaaatgtatcaaacgctagctgaacaaggtttgagtgaagaaggaactcaagcactcattaaatattatcgttagacgaagaaatacccactaactaaggttagtgggtatttctttttatttttctacaaattgtgccattcgatctaatgcttcagccaaattattaaaggaagtagcataagaaagacggaagtaacgatcgcctttttcggaaaaagcatttccgggaacaactgcaaccttggcttcttcagcaagttttacagcccaatcgaaagagttttcggctatttcatcaggaagtttgacgaagaaataaaatgcaccatctggcggaataacagtaaagcccattttttccaggcgatcttgggtgaagttagcacgtgttttgtattcagttcgcatttggaatgcgtcgtctttaccgttagtgatggcttctagtgctgctttttgggaaattgaacttgcgcaagtaacggaatattgatgaattttcagcatttcttgtgtcaaaatttctggggcaagtaaaaaaccaattctccaaccaatcattgcgtgggacttagataggccgttgatgacaattgtttgatctcttagcataggggcaatactcacatgctcttcgtgataagttaattcactataaatctcatcagcaatgacaaaaatacctgtttcttttagtacttctgctaaagcggaaagttcatctttggaaagtgtgacgccggttgggttggatggatagggaatgataagtgcttttgtttttggtgtgatatgtgcctttaattgttcaggtgttaatttgaaattagtctcagtcgtatctactttaacgggatgagctttatttaacgtgatcagaggctcgtaaccaggataaattgggtcaggtaagattacttcatcacctggctccaaaatcgtttgtaacgcgacagaaatcgcttctgtagcacctacagtaacgatgatttctttgttactataggacagatcatatttttcatggaaataaatagaagctgcttcgagtaattctggcatccctgcattgggtgtatagttggtgaagttttcttctattgctgaaatggctgcttgtttaacatgatcgggtgttggaaagtcaggttctccgagtgttaaacggatcatatcaggtatacctgtcactcgtgtattaaaagttctgataccacttacttgaatatcgcgtaattctggtcgaatagattttgtcattttcgtcacctttctttataagaaaatcccgtaaaaattaggtgggagtaagcttcgtaatttcattccattatagcttaaaaagatagaaaagcaaaatgtctgaaaatattactaaaaaaccttgcacttttatttggaatactataagatggttttaataatgataatcattttcagttagaaatgattacttcaatgtggaaggggccaccggatatgactaaacctggtaaatacgaagctctcttttttccaacgaaagatggcttgctaaaaatacatgcttatggctttaatccctgtggttcatggggcgaagtatttgcaacaattggtgatcaaacaatatgcgttaaaggcttcaatcgccataaaacaatcgtgcgggctacaaaaatgattataagcgctactgctaatcgaaaaaacgaattttaattatcaaagactgtagaaaggttcgttcctttttatagtcttttttttggataaaacaacgataaaatagaacaaatcgtgtctattaggttaatttaaaataatttctttttctgaatatttccagaacccttgcgttatacgtgcggtttgcgataaaatttggtagtatagtgaaagaaataagatatggcgaaaaaaccagatatgaggaaatatgtaaaaaagcattgccacgcgcgtataacaagcaaggtatgccaatttttgcacgtcagatggtggatttgagaggagagtgtaagatgtctcagttattgggaattattcaacgtttacatgcaatgcaagaagatgagtctgctgaaacacaagcaagacgttttgaaaaaaatggtacacctgtgtgcgaagtgaagtttttccaagcttctaactcatttgaagtagaaatctatggcgacaatagtaaatatcaattcgatgatattgatatgactgctatcgaaatttttgaaacgctacaagaaaacgaataacatggtaaaaatcggataatctgataatttacttaggggctgtgaacttatattcacagctttttttgttttcaagcgctaaatgaaagaaatcagaccaaatagtatggtagaataggagatggaaaagtttcgatttattttaaaaagttgaaagaaacttcgtagagcttgaaaataaaggaagaggaagattctaaatgatctcaaatagatttggacaatttattgacaatgaactagctgattcgatgatttccgctgaaaaggttgctcatgtacagcttggtaataatttagaacatgcattacttgttttaactaaatgtggttattcagttattcctgtactagactttgaatttaaactccatggattaataagtgcagcaatgattacggatgccattctaggactcgaacgtatcgaatttgaacgattagaagatttaaaggtagaggatgtcatgcaaacagatttcccagtaatcaaagattttaacaataacgaacgaattgtgcacttacttgtggaccatccttttgtttgtgttgtagattctgaccaccattttgaagggatagtaacaagacgtgttgttttaaaacaagtcaatcgttatattcatttgcaggtggaggaaaatagatgattgtaacagagtatgaattacttgtttgtttagcagaagaactaaatatgcgtaaaagtgctgaaaaactctttttaagtcaaccagccttatcgcaacgcttacaaacgattgaaagtagatggaataccaaaatttttattcgtacacaaaaagggctgttgcttacaccagaaggagaagcaattgttcgtcatgcatctagcgtcattgaacgagagcacactattcaagaaaaattagaagcgatggaaggcgttgtccggggaacattacggattgcttgtgcaagcgtagtggcgcaaatgtggcttcctcgggttctaaaagctttttcaagagcgtaccctaatgtgcaaatttcacttgtaactgggtggagcagtgaagttacgcaacaactcgctgctggaaatgtccatatcggcattgtccgtggaagttctacttggaaaagcgttcaaaaaccgttatttaatgacaaattaattttagtagatacagaaattactaaaattgaagaagtttttcagaccaatcgaccatttatccaatttcgcagtgattcgaattattaccaagttattcaagactactggcaacgaaatttcgggaaaatgccacgccaagcaatgcttatggatcaaatggaaacctctagacaaatggccttaaatggtattggttttgcaattttaccggaagtgacgatgttaggctacacagataaaatcaacaaaattccgttaacagaaaaagatggctcaattttaagccgggaaaccaacttactgacttatgaacagtcactcagtttaccacaagtgaaggcgtttttagaaataacagataaattccttgaacaagttaaatagctatggcaaaatagaaagcagaacgtatcggaaggggacaaaaattcatggaacaaatggatgcacaccaaattatttcttttattcaaaatagcaagaaagcaacaccagtaaaagtttaccttaaaggggacttagaaaaaattgattttccaagtgatgtaaaaactttcattactggaaatgcgggaactgtttttggagaatgggcagttgttgagccattattagaagcaaataaagcgaatattgaagattacgtaatcgaaaatgatcgtcgtaactccgctattcctttgttagatatgaaaaatattaacgcacgtattgagcctggtgcagtcattcgcgaccaagtaacaatcggcgacaatgcggttattatgatgggagcaagtatcaatattggttcagttatcggtgacggtacgatgattgatatgaatgtagttcttggcggccgtgcaacggtcggtaaaaattgccatattggtgcaggttctgtccttgctggcgtagttgagccaccatccgcacaaccagttatcgtagaagacaatgttgttgtaggcgccaatgtcgttgttttagaaggcgtacgcattggagaaggcgcagttgtagcagcgggcgcaatcgttacaaaagatgtagctcctggaacagtcgtggccggaattcctgcacgtgaacttaaaaaattagatgcaaaaacagcttctaaaacagaaatcatgcaagaacttcgccaactttaaaaaatcaaagggaactgtttcgtctgttggcgaagcagtcctttttagaaggagagattcgccgtgttaaatgaatttattgccattcgacgtgagttacaccaaatccctgaaacaggttataaagagctaaaaacacaagcttacttattagattatatcagcaaattaccgagtggacatttagaagtgaaaaaatggcgtacggggattttagttttagtaaaaggaactaatccagaaaaaacaattggttatcgtacggatattgacgcattaccgatcacagaagaaactgagctgccttttgcttcaaaacatcctggcaatatgcacgcttgtgggcacgatttacatatgagtattgcgcttggagtgttgacacattttgcgagtaaacctgctaaagataatttgcttttcgtgttccagcctgcagaagaaggtccaggtggtgcaaaacccatcatggaaagcactgaatttgccgagtggcgaccagatagcatttatggacttcatatcgcaccggaatacaaagtaggagaaattgcgattaagccaggtttactttttgcgaatacatcggaactgtttatttcgttcaaaggaaaaggtgggcacgcggcgtatccccatttggcgaatgatatggttgttgcagcaagtgcgtttgttgggcaaatgcaaacgattataagtcgtaatattgatccaatggatagtgcagttattacgattggaaggattcatggcggagaaattcaaaatgtcattgcggaaactgcttatttagatggaaccattcgaacgctttctccggaaacaatggagattgtttggactcgtttgaaacagctagctaaaggctgggaagaagcttaccaatgcgaagttgaatttcatcctggctcggattattatcaagtagacaatgatccagttgaaacagaagaattcatccactttttggaagaacaatatccagaaagttatgtgccagctcgttcagcgatgactggagaagattttggttactttttatccgaaattaaagggtttatgttttggttaggcgtggattccgagtacagtttgcatcacgcgaaacttaatccaaaagaagaagctattccatttgcaattgatgtattaatccactttttggaaagtaaataaaaagacgtcaattcgttctcaaaaggagcgaattggcgtctttttaattattatttggtccgaatgtgctaacaaaattgagtggtagttcaatcttgttttctgcgagtgcctcgcgaatatctttgagtaagtcacgttgaacagaatactgctcgccgttcactgctttaccgactacgcggataatcatatttgttgcgtctatgttttgcacgcctaatacaacagggggctcaacgatatttttattctcttttgcagctacgtcacaaacctcaccaataattttaattgctttttctggatcttcatgtggactaatttgaatgtccaccatcacacgcatattaccgcgcgaatgattactaacgaccataatttgtctgttaggaatgaaatgaagcgtgccatcaaaatcacgtacctgtgttgttctaagtccaagtgcttccactgttccattaactagtccaatagtaatcgtatcaccaacatcgagttggcgttcaagaagaataaaaaatccagttacaacgtcactaacaagaccttgcgcaccaaaggcaattgccaaactggccaccccagcacttgcaataattgccgtaacatccataaagttctgtaataataaaatcgcaaaagtgaagaataaaacatatccataaaaattagaaattaagctttctaacgtgtccgcgcgcccaacagaaactgcttgttgttgccgatatttgcggaagaaactacgaataattttattaccaatcacacggaaaataaaataaagagcaattaaaatggcaatttttattccgacagaaataatatgattccaaaattggtcccagtcaatagaactgaaccactttttgagtaaattcattttttggtccacatcctttgaaagttctccatccatttcatctcccccttcctaatgaaatgtccttttctattctaacaaatattttacaaaaatgctgttttaaaaaataaattgttaccggaaattgcgtgtttttcccgaaaaatcttctttttttacaaaaaaaattaaaaaactgttagccactgttgttgtaagatggaggcgctttcttaaaagcttaaattagcgcaaattgaactgtatgatgtgaaactaagccaaaacttgtgtacaatgataaatgttattgcttttttaaaagtgatatgggccgaatttttgcctagtaaataattcaatctaaaaaaagaaaggggattttattttgagcaagattaaagtagaagagctaacgaaaatttttggaaaaaaggcttccaaagcatcttctttactttctcaggggaaatcgaaaacagatattttgaaagaaacaggggcgactattggtgttaataaagcatcttttagcgtagaagaaggagaaattttcgttattatggggctttctggtagtgggaagtcgactttggtacgacttttaaaccgtctaattgagcctacgagcggaaaaatttggcttgacggaaaagaactatccagtctaaataaaaaagaacttttggaagttagaagaaaaagcatgagtatggtcttccaaaactttggtttatttccgaatagaacaattaatcgtaacgtagaatacggccttgaaattcaaggaatggacaaagaagagcgtgaaaaaaatgcagcagaatcgcttgcgcttgttggtttagctggttacggcgatcaatatccttcgcaactttctggtgggatgcagcaacgtgtaggtctagcgagagcacttgctaataatccagatattttactgatggatgaagctttctccgcgcttgaccctcttaacagaaaagatatgcaagatcaattgctagatttacaagataaaatgaagaaaacgattatctttattacccatgatttggatgaggcacttcgtattggtgaccacattatgattatgcgtgatggttctgtcgttcaaacaggttctccagaagaaattctggcacatccagcaaatgaatatgtagaaaaattcattgaagatgtagaccgttcgaaagtctatacagcgagcaatgttatgattcgtccagaaatcgttaattttgaaaaagatggtcctcgtgttgcgcttaaacggatgcgtgaagctggaacttccagtgtattcgttgttaaacgtaatcgtgagctagttggtattgtccatgcagcagaagtatctaaactagtaaaagaaaatattacttcactagaaacagctttacatcgtgatgtgcctacaactggcctagatacgccacttgcagaaatcatggatactatctcgactacaacgattccgattgctgtaacagaagatggaaaattaaaaggaattattattcgcggatccgttctggccgcactttctggaaacgaggtgaacgttaatgcctaatattccaacgattccattagctagttggattgacaaattagttgatggcttaacgcaatttgaaggattttttaatgtaattacgaatatcattggcgggattgttgacgcattccaatgggtgttcgatttagttccaccatggttatttattattttacttgtatttggcacattttgggtgaaccgtaaaggcaaaaaatggggtttaattatctttgaagttgtcggtttacttttaatttggaacttggacttctggcgcgacatgacacaaacattaacgcttgtgctgacaagtagtttaattgcacttgttattggagttccacttggtatttggatggcgaaaagcaatattgttgaaagtatcttcaaaccggtactcgattttatgcaaactatgccagccttcgtttacttaattcctgccgtagcatttttcggaattggaatggttccaggggttgtggcttctgttattttcgcaatgcctccaactgttcgtatgactaatctaggtattcgccaagtttcaacagagcttgtagaagcagccgattcgttcggttcaacaccttggcaaaaactttggaaagtacagctaccaatggcgaaatcgaccatgatggctgggattaaccaaagtatcatgttagcactttccatggttgtaattgcttccatgattggtgcaatgggacttggaacacgtgtttacttcgcagtaggacgtaacgacgctggtggtggatttgtagctgggattgctattgttattgtagcaatcatcctagaccgtctgacacaagctttcaataaaaaagcgaaatcagaataaggaggagagtagattgctaaaaaaattaatcactactgcagttttggctatgcttattttcactttagcagcctgcgggacaacccttgctccttatgacgcgaaaaaagatttaggcgaacaaatcaattacacaatcacaggtattgatgctggagcaggaattatgcttgcaacacaaaatgcgattaaagattatcatttagatgatgataattggcaattacaaacaagttccactgcggcaatgacaagtacacttcaaaaagcgatgaaagataagcgtccgattgtcgtaactggctggacaccgcactggatgtttacaaaatttgatttgaaatttttggacgatcccaaaaatgtatatggtaatgcagaaaacattcacacgattgtacgtaaaggcttaaaagaagataaaccttccgcgtaccaagtgttagataatttcttctggactgcggaagatatgtctgaagtaatgctggaagttaatgacggcgtagaccctgaagaagctgctaaaaaatggattaaaaacaatccagataaagtagcaaaatggaccgatggagtggaaaaagttgatggcgatgaaatcaagttaacttatgttgcttgggattctgaaattgcctctacaaacgttgtcgcagaagccttaaaacaagttggctataaaccaaccatccaagcaatggaaatccaaccaatgtgggcgtccgttgcaacggatgcagctgatgggatggttgctgcgtggcttccaaatacttccggaatttactataaagattacaaaggaaaatttgaagatttaggaccaaacttaaaaggtgctaaaattggtctagcagtaccaaaatacatgacaaacattaattccattgaagatttaaaaacaagcaaataaacttttaaaaaggcatgaagaaaatcaagtgatgcttgatagtttctccgtgcctttttttctctataagggtaaaatagtagttgattcatgaaattgctaggaggaagatgcatgtttaaaaaattcttaaaaaaatcgaaacaagaagtactattcgctcacgtaactgggcaagttattgcattagaagatgttccagatccagtttttaatcaaaaaatgatgggagaaggcattgcaatcaaaccagaaactggcaccattgtcgctccaatagacgggaaaattattcaactggcagaaacaaaacatgcttttggtattcgtacagatatgggacaagaaattcttgtacatattggcttagaaaccgtatccttaaatggagaagggttcaacgttttagtcagtgtaggagataaagtaaaagtaggcgatcctattgtagaagctgattttgattttattgaaaaaaacgctgccagtactgttgtaccaatggttataacgaatagctcagaaggtaaatatgattttgatttccatgctgtaccaaaggcggaagcagggaaaaccgaagtcattacaactaatttaaaataatgaaacaaaaatccgtgaaaaggtaattttcttttcatggatttttttgtattcaagcacgccttaaaagggtaaaatgaaggtaattagttattaaaaggagcggaataatatgttagaagtgatagttcaaaatccaagagacgcttacttagcggaaaaatatggcgcaaatagaatggaagtagtttcagcaataagcgaaggcggtttgactccaagttatggtgctattaaagaaatcgtacgtgcctctaagttaccagcaatgatgatgattcgaccacatagtttttcttttgtctatgatgaggcagctaaaatagtcatggaacgagacattgagcttgcaaaagaagttggcgtgcaaggaattgtttacggtggtataacagaaaacggagcaatcgatcaagctcttctcgaaaaagtaattgaatggaaaggtgatttaaaccttactttccaccgggcgctggaagcaaccaaagatatcgaagcgagttaccaagttttacgtacatatggaaaagacatcaaccaattattaacttcaggtggtacagcaaacgcacttgactccttgccacgcctaaaacgctggattcaagatagcgaagcacagccagattcattccaagttttagttggaagtggcgtcaaaccagaaaatatcgcgaccttccaagcgacattaaatcatagcgactaccatgtaggaagcgcggctagagaagccaatgatttttccaaagacattttaaaagaaaaaatcgatattttacagcaacaaataaacaaagattgattctttgtagtaggtagccttacaagcttagataagctataatgaaacaagactattcttaatgaaaaggtggaaaaaaagtgaataactatattggcaaaagccaagtaatgacagtaaaagaaatcaaagatacaggatggctccttgaaaaagacggagtaactgtttttttatctaaatcaaatacgcatgaaacggaacttgctgttggagcagaagtaaccgtatttatttttgtggactatgaccgtgaaattgcagcaacaacgattattccgaaaattcaagtaggacactatggttggggaacagtaacagaagtacgtaaacatctaggcgtttttgtcgatatcggcattgaaaaagacgttgttgtctctttagatgatttacctgcattaccccatctatggcctaaaaaagaagatcgtatgatgattgcactgcgtgtggatgaagaaaatcgtgtttggggtgttcttgcagaagaagaacaattccgcgcaattgccgttcgcgcagaacaagatttatttaaccaaaatgtcgaaggaaccatttatcgtttattaaaagtcggttcatttgtttttacggatgattttcatattggttttattcatgaaagtgaacgaacttcggaaccaagaatgggggaacgtgtgaaggcccgtgttatcgctgtaaaaccagacggctctcttaatttatcgcttcgtggtagagcgcatgaagtattaaatgatgacgcggaaatgattttaacttatttgcgaagtgttggtggagaaatgccattcggagataaatcagatccagatgccattcgtgccaaatttggtataagtaaagctcaattcaagcgtgcgattggcacacttttaaaagcgagacgtatcacacaagaaaatggtgttgttacaaaaattacggaagaaacatccgactaaagtagtaggctatgttccaactagcgcggttgtttcaatcaataaatcctcgctataattaacacagcatgtacaaagtaacgaaaatcgagaaataactttgtcaaaagaggaacgtaaggaggtgtgtcagcttgaaaaaaatggaaagctcggttgtttttgtatttttaattgcgattattgttggtgtgggactggagatgttattccagtgggagttgcttattttatttgcactcggaatattttttatctttacatcaagaaaagcaagcgcaacaaagaaaagtgcaagaaactcattatttattggaatcgtatttatcattatcgccgtgttacttacaaccacttttaaagttgggcttgttgttgcaggtatttacgcgatcattcactatattagtcggaagcgggcaccccaattattaatgctcaaaacgagagaaccggatagcaagattgatcgtacggataagtttattcgtaatcagtggttcggtaaccagcgcatactcgacgtagtgtatgaatgggacgatatcaatatccaaacggggattggtgatacgattctcgatttagggaacacggttttacccactggcgaaagtgtcattatgattcgtagcgtttcggggaaaatccggatattggttccttttgatattggtatttgcattgagcattccgcaatcttcggaaacatccaatatgataaagaaagcacctctattcaaaataatagcatcaaggtctactcagataattatgaaagttccgcacgaaaagtgaaaatcatgacttctgtaatcttcggagatttagaggtgattaggctatgagtttttcgaaactgatgatggctgtttgctcaggtttactgcttgttgcaacagctatcggtacggtcggttactatttttttagtgaaggctcttggtataaaattctcatcgaacaaaaaatcttttacattccctttgtggttttcgttccgcttactgccatttcgattggtttaattattggcggtctgatcggttattttgttaaacaaaaatttgaatcaattgacttctcgattcgattgcttggacaaggtgatttggagaaaaagattacgagtgaagaagacgagaactttttagaagtgcagcaagtatacaagcaaatcgaccgcttacgtgataaaatgaaagcacaaacgattttgacgcaaaaacttgcaagcgaccgtgctgaatcaactggccaaacgaaagaagctattttgtcagaagagagacaccggattgctagagaattacacgattcagtgagccaacagctttttgcagcaatgatgcttttatcagccttgaatgaacagagtgaaaaaagcgcgacaccggcgatgcaaaaacaactaaaaatggttgaatctatcgtaaatgaatcccaatcagagatgcgtgcgcttttacttcatctgcgtccaacgcaactcgagggtaaatcattaaaaactggtattgagcaattattaaaagaattaacaaccaaattgccaatcgaagtagaatggcaaatcgaggatattagtttgcaaaaaggcattgaggatcatttgttccgtattgttcaagaattactttccaatacattacgacattctaaagctaaattattagaagtacgcttagtcacgatggataatttagcggtgatgaaagtagtagatgacggcgttgggtttgatatggataatgttcgacaaggctcttatggattacaaaatatgcgagaacgagttgccgaattcggcggcaccatcaaaataattagtttcccaggaagaggaactagtgtagaaataaaaatcccacttgttgcgaaaaaggacgtggaaagcgaatgataaaagtattacttgtagatgatcatgaaatggtacgtataggtgtctcagcttatctttctgtgcaagatgacatggaagtagttggcgaggcagagaacggtcgtgaaggggctgatatggctctagaactacgcccggatatcatcttaatggatttagttatggatgaaatggacggcatcgaagccacaaaagaaattatgcaaaactggaaagaagcaaaaatcattatcgttacaagttttattgatgatgaaaaagtatacccggcacttgaagctggagcgagcagttatatgcttaaaacttcgacagcgagcgaaattgcagatgcgattcgagctacatacggcggagactctgtccttgaaccagaagtaactggcaaaatgatgcaacggctaaccgctaaaccagaaaaaaacttacatgatgatttaacgaatcgtgaaaatgaaatcttacttttaatcgcagaaggtaaatctaatcaagaaattgcggatgaactttttatcactttaaaaacggtgaagacgcatgtaagtaacattttatcgaaattagacgtgcaagatcgtacgcaagcagcaatctatgcatttaaacatgacctagtagaaaaaaagtagcaaggaggtaacgtacacatgaaagaaggatttgcagtcatcggtcttgggcgatttggtgggagtatttgtcgttcacttgttgagcaaggaatggaagtacttgcgattgattcggatgaagagcgcgtcaatgaatatatgtccattgcgacccatgcagttatcgctaattcaacggatgaaaatgcgctacgccaactaggtattcgtaactttgagcatgttatcgttgcgataggtgaagatatacagtcgagtatcttaacaacacttattttaaaagaaatgggcgtgaaatacgttaccgcaaaagcgacaaatgataagcatgccaaattgcttgataaaatcggagcagaccgtgttgtccaccctgagcgagacatgggacgacgtattgcgcattatatcgtatcgaaaaacatgctagattatcttgaactatccgatgaatatagtctagtcgaaatctctgtatctgatccacgtttccttgggaagagcctagttgatttagatttccgtaactcttttggtgtcaatattgtcggtattaaaaaagataaacaaatgattattactcctgaagccaatgatgttctacatgaaggagatattctaatcgttatcggttcggatgatgacattgaacgactacaagaaaaaattcaataaaaagaaaacctatgtaatataaagagatatgtcaacatgtcgagtatattcttaggtttttttattgtttgcgaattaccgcttgctatctagccagttattttctattatagttacagagcttcacataaagggacagaaggagggggaacagatgaagaaatttttgcttgataaaatcggcgctcgaggattaattcagatgttgcaagcatttatttatgcgagcatttgtgtagtggtccatacagttatttttcctgatttggccggggtattaccaatagtagtactaatagggattatttcaatgcaacctacatatggaattacaagaaaagtcattccccaaatagcgctagcattcactctagcgtgtgtttttgtcattataagcacctattttttcccaatcaatgtgtatatttactatgttgtcatgatagttgttattttggcggtgaatttcttgatgccgcagaaatatatggtaatgacactcgcgattgggacagcactttactttcttggaacagatgatttaccaatgcctctctatgccatgataattgtagcgttaatggatgtgtttgtgttctttttacttgtgcagttagtcgtaaaatatgtacatttaccactcgaaaaaaccgttcaaactattatgaaacaattggtaggactatttgacaaggaaattgaaagtgtatttaaaaataatggtaaatttatagcaaaaccattgtatagtatttttgttcaatcacaaatgtttattaaagaatatagtgctagtaaaaaagcgaatcctcgtcatgtggaactgtatcaagcattactgcctaattatctacaacttttttttcatatgcaaacaatggaagacattggacgagttggtttgtcggaagaagcaaaacaggcccttgctcaaattaacgtgaaagtttctgatgaaattaacgtgaaagaagccgatccagttgcctcttttcatgtgaagaaatttgttgagaacttcctagctgttaaggttggaatgaatgagttagtagaagggagagggcagaaatgaaaaagatttctatgagagaacgtttcgctcttgatcctcgagttgctaaagtgcttattagtattacaatagcagtgattttattcccggttatgggtgattggattgtgtatccaacatatgtatttaatgctatttatattaccgcgcaaatgagtaagggtgatacatataaatcaagcatcgagcggattatcggtactattgtaggtggactacttgcagcctttgtatacttactagtccccaaccatcattatattatgattccgattggcgcagcgcttgcagttatgctaagttatctatttactaaaaaattcacgatggttattgttgttattacagtaatggtacttgtcggaaaaggcgacggagagccgatagtctttttaagagaccgactatttgatacgatgattggacttgtgattggttttgtcgtctatgctctctacccacgtaagaaaaacaaaaaattaaatcaagtgtttatttctcaggaaaaagcagtattagaaagaataaaagaaattgatataaatagtgaagatgcgaaatctctagctcccaaaataaaaggtttgtggaagcagttaatagatttaagaaaaacgcgcgaacaaattattacagacagcagttttgttgcgagtttgacttcggatgaaccaatgcttcattttactcatttagtagagcaagcaattaataatattgaaattttatatcatgtgacgcttgaaaaagagtctgaacctgattatgaagttgtatttgcttatcatcaacaagcttgcgctaaagtaattacagagatggatgcacttattacgaaacataaataaaaaagatgactgaagctcgttcaagcctcagtcatctttttttattcagtaatatctaaactctttttaaacatagtaattattcgctctaaatctgttttatcaggagcgaaataatataaatcaaatccgtaagactcgctataaatcatttccccttcacctttaagttcttgggaatcaacgtttttaagtacggaagaataatttgctgccatggatgtaatatctgtaagcgtcatattagtttggaaattatcgccaacagctttcataatgctttcgaaattggaaactccggatgaactgataactttattcgcaataccaataatgacatcgcgctgtctatcttgacgaccaaagtcaccacgggggtcttcatgacgaatacgaacatattgtaaagcttctgttccatttaaagtaatgttacctttaacaaatttgctatttacttctgttaagtcgatatcgttataaacagtaatacctccaacagcatcaactaggtctttaaagccctccatattgattgaaatgaaataatctacaggaacacctggcataagtttttcgaccgctgaaactgttcctgaggggccaccgttggaataagaggcattaatcttaccaatgtcgccatttccgtagtctacttttgtatcacgaggaatactaaccatttctacggcattttgttgtttattagctgtggcaagaataattgtatctgcgcgaccatttttttcaccagctcgggcatctgaacccatgagtaacacagagaaaggttttttcttttctaaatcacttaaagttttattacttgattctagagggacatttatttttgaaaaggtattttgaacggtgatgtaatacttcgctgccaatcctgttatagagaagaagataattcctaaaagagcaacactagcaattttcataactttagtaaaagtggacgttgtttttttctttttttcagtcctagtttctgtcataaaattttcctcgtctttctattttgtttgtttaaacataccatcgtctttctgagaaatcaacaaaaaaacgataaatgattttgaaaccatttatcgtcttgaaaactatacttccatgattattggtaaaatcattggacgacgttttgttttttcgtacaagaaaggttgcaaagtatctgtaatttcatttttgatttcagaccattgcgttgttttttgttccattactttgtttaagtgtcgcgttaggaggccttgcgcttctccgatgagattaccggattcacgcatataaatgaagccacgtgaaataatatcaggtcctgccatcacacgagaatttttcatatcaatggatacaacaacgattacgaggccttcttcagaaagaatacgacgatcgcgaaggacaatattaccgatatcgccaataccgctaccatcaatatagacgcttgctgcatggattttaccagcaacatgagctgtttcactcgttaatgcgagtacatctccgtttgccataataaagctattttcttccggaacaccacattcttcagcagactctgcatgaattttttgcattctgaattcaccatgaatcggcataaagaatttaggtttcatcaaacgtagcattagtttttgttcttgttgaccaccgtgaccagaagtatggatattgtttactttaccatggataacttctgcaccagcttgataaagtaaattgattgttcggtttacactcgttgtattaccagggattggggaagacgagaagactaccgtgtcacctggttgaatttggatttgacggtgcgtaccgttagcaattctagaaagagcagccattggttcaccttgactccctgtacaaaggatagtcacatttccagcgggtgttttattaagttgatgcacatcaataaatgtgtcttttggcgcttgaatatagcctaattgtttaccgatttccatagcagattccatactacgaccaaaaacagcgattttacgaccagtttcgatagaggattccactacttgttgtaaacggtagatattagatgcgaaggtagcgaaaataattcgtccttctacatcgcggaaaatatttttaatactttcgccaacgacacgctcactcatggtgaaatttggtacttccgcatttgtactatcagatagtaaacaaagaacgccttctttaccgatttcagccatttttgttaggtttgctggttcgccaactggagtaaaatcaaacttgaagtcaccagtatgaacgatgttaccagatggagttttgacaacaataccatacgtatcaggaatactatgggttgtacggaagaaagagatacttgtttttctgaatttaaaaacgtcatcttcttcatattcataaattttggtttgacgaagcaagccatgttcttctaatttgttgcggataagtgcactcgcaagtttcccagcgtaaattgggatattaagatcgcgaagtaggtaaggaacgccaccgatatgatcttcatgaccgtgggtgataaaaagtcctttaatcttatctttgtttttaaccaggtaactgtagtcaggaataacataatcaatacctaaaagttcgtcttctgggaacttgattcctgcatcaattagaataatttcatcttgaaattgtacgccatatgtgtttttaccgatttcgcctagtccaccaagagcgaaaacagctgtctcattatttttaacaaatttcatataggcttatttttcccagagcgcgaagtctgggttttccttttcataagctaaatgcgcgtcactaattttttcgacaaattcgatgtggaaaggctcatcttttaaaagttggcgtacttttacttcgctttccgcttctacatatagtgattgtgttttttcacgtacgggtgtttctgtaagtgtttcttgataaaatactttaaaaatcatgtttttctctccttaaaatttaagttttgttttttaaaaatagattttcaagctgaaaacctaatatttatttagtattcattggcttgctttcagttgtggacttagtagcaagcggatatgggtgcacgagatactgacaatcaggcataaaaaagacaaagaaaaattaccacagactaatgtataaaaatagctgtgcacgtatgttaaatttcttatccgttataattgcatacctttattttgggaatttgaaacaaatttccgagtaaaagatgtaattataagttttttttcacgttccattgtcgttctacaaatgttcatccgatctatatccttcattctaatataccataaatccagataattgctactagaaagtataattaattttgtcaaccctgttatcaaggagattttctgctataatttaaacataatgatttaaaaatggatagaggatagaggcgtttaatcaatgagtaaaattgtgttttttgatgtagatggcacacttgtaggagaaacgaaagaaattccagcatcagcgaagcaagcgattgctaaattgaaagaaaatggtgtttatgtggctattgcaactggtcgcggtccatttatgcttgacgaaatcagaaaagagttagatattaattcttatatttgctataacggtcaatatgttatatttgaaggcaaagaaatatacgctaaaccattaccaaccgagtctttagaacgtttaatcacggttgcatcggagcatgagcatccaattgttttttccggaaaagattccatgcgcgcgaatttgcctgatcacgaccgggtgacgattggaatgaattcgattaaaagagagtaccctaaagtagatgctaattattataaaggtcgagacatttatcagtgcttacttttctgtgatgaatcgtatgatgcttactaccgagaagaatttaaacaatatggtttcttgcgatggcacgatgtttccgtggatgtttgtccagcagacggttccaaggcggaaggtattaagcagatgattaaaaaacttggcttttcgatgaaagatacttacgcattcggcgacggtttgaacgatattgcaatgcttcaaactgttggaacaggtgtggcaatgggaaacggccgtgatgaggtaaaagcagtggcggattatgttactagtcatgttgatgatgatggggtttataatgctttaaaacagttaaaattaatttaaaataacaaaaaaagcctgtgctctatttttgagcacaggctttttttgttatttttggaacggaacacagctagttctctcgattaagcttgtattcacttggatttgtctggtttcaaaattcgtatctgctttaatttgtttggacaagagggcaagcgtttgttcagcaatatcacgttttttaacatgaacagttgttagttctggtgtaattactttactttcattgatattgtcaaaacctaatacggaaacttgttcaggtactttgatcgatagactttgcagcattttaatcatgctaatagccatgtaatcattttcgcaaaaaagggcagaaggtaaatcttgcaattcagcaatggcttcttttaccgaagcttcctcttggatttgcattgcagatagatgaaagacatgttcttcaggaactgaaatatcggcttcttctaaacgagcaaaaaagccacttttccgctcatcaaaatttttaatgcgtggtagccccatcacataaccaatttttgtatgtgatagttgtaaaaggtagtcagctgctttatatccgccaagaaaattattaatagaaacaaagttggctgagatatgcggatggtgtgtatctaagacaacgattttaggatattcttgctgtattcggttaatttcttcagcgtttaaattagtgccaagtaaaataaggcctgctgttggttgctctttttctgcttcagcaagttcttctaatatggttgttgcatcaaaggtagagataaccaaatcatatgggtaactagcaatttcagcagataaatagctaagcagctcactgaaaaagggtaagttctgatattgttcggtaatcaaattaggacttttgcatgcgataaaacgaatggttgatttctttttcatttttttattggtgtttcgtaatgggacgtaattattttcttcgacaatttgtagaatatgtaaacgggtttcttcacttacgccagcttttccattcagcgcaagggaaacagccgatttcgaaacgtttgctaatcgtgcaatatcttccagcttcattattcatttctccttgtttactaaatttatctagtttagtatatcatgtttagtaaatcggaacaaaaaaatagcatatttccagtcattcaaaactttagtttagttatttatcataaaataaactaaaataaaatataaaataatctttaattttattgacttggtttataaaaaatactataatgcaaataaagaaagcgattactggttgctttctatgagactaaaataattactaaactaaaaaaggtggttagaagatggaggcgattaaaattgggtttgcaccgacaaggcgcagtatatttagtgcgccagatgcaatcaaatatgcaaatctcacacgagataaactaaacgaactaaatattgaatttgtggacattacagaatttaatgaagatggattactttatgatgatgcagatgtgatgaaaattgcagcaaaatttaaaaaggctggaatccaaggtttgtttttaccacatactaattttggaacggaatatgtttgtgcaagacttgctaaagagttagatgtaccagtgttgctttggggtccgcgcgacgaacgtcctgatgaaaatggtataagacttcgagatacacagtgcggtttatttgcaactggaaaaatcttacgtcgatttcaagtaccatttacatatatgacaaattgccgtctatctgatccagagtttgaacgaggaattcgagatttcattgcagtttgtaatacagtaaaaacatttcaaaacatgcggattttacaaattggaccacggccattcgatttttggacaacgatgtgtaatgaaggagagttgctagaaaaatttaatgttcaattagcaccaattccacttccagaattaatgaaagaaattcgtagtgtatctagcgaacaaatagaggaagtagatggaaccgtcgaatattgtcacgggtgtgcaatcgttaaaattaaagaagttgacttacgaatggttgctgctcttaaagtagcaatgaaaaatttagcaacgaaatatggttgtagtgcgattgccatccaatgctggacagcacttcaagatgaaattggtattatgccttgcgctgcaaacgcgatgctcattgatgaaggaattccagttgtttgtgaaacagatatccatggagcaatttcttgtttattaatcgaagcggcaaatttaggcagaaataaaagctttttcgctgattggactgttagacatccagataatgagaatggtgaattgctacaacattgtggactgtttccgttttctgttgcaaaagataaaccggcaattggctatccgttagcgtttgattcacctggtgcagtcgaagcggaagcgaaaggtggcgaattaaccttatgtcgttttgatggtgataatggcgaatattccttgttactgggtaaagcgagaggtattgaagggccatatacaaaaggaacatatctttggattgaggtagacaatttgaaacgattagaggaaaaaatcgtttctggaccatatattcatcatgttagtggcatccatgcagatgtggtcccaattctttatgaaacatgcaaatacattggcataaagccagacctctatgatccaattgaagaagatataaaagcttatttacgcggtgaatagagaaaggagtaaaaaatgagtgaattaaagttaaaatcgtttgaaattagaaaagatgttctaaaaatgatatacgatgcaaaaacgggacatactggttcagatttatcatgtgcggatattctcgtggcgctttgctatggtgtgctgaatgttaatccggaaaatccagaagctttagatcgtgatcgttacgttcaaagtaaaggacatgctgtcgaagttctttgggcagttttagcagataaaggattttttgcaaaagaggaattggctgatttctccgcatttggctcgcgtataatcgggcatccaaataataaagtagctggaattgaaatgaacacaggttcgctcggccatggtttatctgtttctgtgggtatggcattagctgctaaaatggatgggaaaagttatcacacctatacactcatgggggacggggaacttgcagaggggtctgtctgggaaggcgcaatggctgcagcaaattataaattagataatttgactgcgattattgatcggaactccttacaaatctccggtcgaacagaagatgtaatgagtgtagaacctttggcagataagtggcgcgcatttggttgggatgttatcgaagctgatggaaataatccggataagctacaagcaatttttaaaacagttaatgagactggaaaacctcgtctaattattgcgaaaacaataaaaggttatggtgttaaaatggctgaaaatgttgctaaatggcatcattacgtaccaagcagtgaggaatacgaaatagctatgaaagatttagaggaaagaatggaggcgtgccgtcatgaataaaatagcgaaccgccaagtaatgtgtgaagttttaatgaaagaagcaactcgtaacgatagtaatttagttgttttaacaagtgattcaagaggatccgcttcactgggggcttttgctgagaaatttccagagcgattaattgaaactggtattgccgaacaaaatattgttggaattgcagcaggtttagcacatagtggcaaacgagcttttgtcgcttcaccagcttgttttctaagtatgcgcagtattgaacaggtgaaagtagacgtggcttattcagacacaaatgtaaaattgattggcatcagcggtggtgttagttatggtgcacttggtatgagccatcattcgcttcaagatattgctgttactagagcgattcctaatttagaagtcattctaccagctgatcgtctggaaactgaagctatttttgactatttgcttcaatcaaatcggccggcgtacgttcgtcttggcagaaatgcggtagaagattgttacgcagaaaaaccagtatttcaaattgggaaagctggaactcttagggaaggaaacgatgtgtcaattttagcaactggtgaaatggtacgtgtcgcacttgatgcaagtgaagaattgaagttgaaaggaatcagcgcacgcgtattgaatttttcaacaatcaaaccatttgaccaagaagtagtaaaagcggcattaactgaaacgaaactacttattagtatagaagaacatagcatttatggtggcttaggtgcagcagtgagcgaagtggtaagtagttcgccaacaagtattcgtcatttgattttaggaattccagatgaacccgctatcgctggaacgagccaagaaatttttgattattatggcttatctgctactggtattgttgctacaatcatgaaaaacctaccgatcattggagacgaaagaagatgaagaaacactatcaaatagccattgatcaaagcacatctggtacgaaagtattattgtttaaagaaggcaaacttgtagatcgtttagataaaaagcatcgacagttgtatccaaagaaaggctgggtggaacataatcccatcgaaatttgtcaaaatgtccgtacattaattgcggacatcttgacaaaacatgatttaattacagcggatatcgaacgacttgctttgacgaatcaacgggaaacaattgtagcttgggataaacaaacggggaagccactttataatgcgattgtatggcaatgtaatcgaacaaaagaaatttgcgaaacgttaaaagaagctggttatgaaaaaagaattaaacagcttaccggactgaaaattgattcttatttttctgcttctaaaatgatgtggttattggaaaatatttcagcggtgcgggatgcagcaagtcgtaatcaattggcatttggcacaatggatgcttggttgttattttcgcttacggatgatagtaattatttcacagaccgaacaaatgctagccgcacactcctttatgatattgaaaaaaatgattggtcagatgagttactcgaacttttcggagtcaaacgtgcttatttaccagaagtgaaacaatctgctggaagttttggaagttatcaggagataccgattcatagtgtgatggctgattcagaagcggcactttatggacaaggctgtgatacatttggggcagtgaaggcgacgcttgggacaggatgctctgttatgatgcaaattggtgagaacagattacctgaaaacgatgctattttgacaactcttgcctgggatgttgcaggcgtgaaccagtttgcgttagaaggaattattcgttcttgtggagacacattggtttttttatccgaacaattagaactatttaatgattacgatacagcttgtaagcgagcatttcaattaccatgcaatgagggtgttgtgctaattcctggacaattaggtttaggcgccccttattggaatacagatatacgagcagagattctcggtctcacacgagaacatacaaaatggcatattattcgtgccggttttacaagtattgcatttcaaattaaggctgttattgaccaaatggagttaatgataggtcaaaatattaagcgcttacaagtagacggtggattaacaaagcaacatgagttgatgcaatatttagcagatgttttaaaagcagaagtggcagtcagtcccgcggaagaactttcggcaattggtgctattgaaattgccgacaataacctacaaaataagagaacgatagcaaaattgtaccaaccaagtatcactcatacacatgctctggaagattttcaagaatgggaaaaacaagtgaaaagcagtattctaaaaatacagaaggtgaggaattttaaatgaataattcggatcttgcaaaagaggttgtaaagcttgttggtggaaaagaaaacattttgagtgtgattcactgtgtgacacgactacggtttaagttacgtgatgaaaatctagcagaaacagaaaaaatcaaagccttaaaaggtgttatgacggttgtgaaaagtggtggacaataccaagtggttattggtgatcatgtgagttatgtttatgatgaggtcattcgagtattaggtattaaaccagatgatgcactgcaagataatcctgaacaagaacacaaaagtatttttaataagtttgttgaattaatttctggaatttttatgccagtactgggtctattggcagcttcaggtattttgaaaggattcctgacagcggcagttacaatgggactaattaatacctcagctggtgtttacgaagttctttacgcggcaagtgatgccctcttttactttatgccaattatacttgggttttcagcagggaaagtatttaaaacgaatcaatatctttctgctgcggttggtgcagcacttgtttacccgacgcttgttgatatgtatagcagcggagctcatttaacatttctacatatccctgtaattttaatgaattatacaatgtctgttattcctgttattttagctatttactttatgagcaaactggaaaaagtattagtgaaatttattccgaaaagtttacaattgatttttgttcctctattattacttttaattgtggtgcctgtgtctctaattatcatcggacctgtttcaacgtatgctagccaactacttgcaaaaggagcattggggctttattcgcttagcccgatgattgcagggttcttcctggctggggtttggcaagtggctgtcatgttcggattgcactgggcatttatcccgattttcattaataatatttctgttttagggtatgatccaattaatgcaatgctttattgtactgtattcgcgcaaactggcgcggttatggcagtaatgctcaaaactcgaaaccaagaattgcgttccctttctataacagcaactatttctgggtttttaggaatcacggaaccagcgatttatggagtaaacttgccgtataaaaaaccatttattatggcttgcgtaggatcagcatttggtggggcaattgcaggtatgagtgctgcaaaaatgtttggaggtttcgcttctggtgggatttttggtattccgatgttcattaatccagatggaataggctgggatttttggggattcttaatttctctagtagtagcattcagtgtagcattgattttaacttatttctttggatttaaagataaagtagaggaagtagtaattcaaacaggagaaaaagctacattagatgaaactatttatagcccacttcaaggggaattgattgcattaaatgatgtgaaagatgaagttttctctgctggtataatgggagcaggagtagcgattcttccagcgagtggcgagattcgtgctccatttgatggaacagtacttagtgttttccaaaccaagcatgcgatagggttgatttccaaacaaggagtcgagttgttaattcatgttggacttgatacagttaatctaaatggtcaattttttgatattgaagtaagcgaatcagaagaaataaaaaaaggtgatttattaggaacatttgaattggatacaataaaaaaagccggctatgatattacaacacctattattgtaactaatagtgctacactcgccgatgttattacagtaaaccttggaaaacacgtagacaataaccaaaagattttagaagcaaaggcttaatatagaaagggtgaaaaaaatgttaaaacaaagtgcagataagcgccggattgagaaaaatgataaaccttttttctaccttgcagatactgtttggagtgcgtttacgaatattgatttaacagattgggcctactatttaaaagtccgaaaagagcaggggtttaatgtactgcaaatcaatattttgccacaatgggatcgaagtgtactaaaaaaaattcaagagccgtttggtataaatgaaggttttttcgatttaaaagctaaaaatgaagcctactttaaacatgcagaaaagatgttagaaatggcagtgaatcaaggttttactccagcgcttgttttgctttggtgtaattatattccggagacgtggggggcgaaatttggtacttcaccactgtttcgaaaagaagacattaaaccctatacagaaatgatgttggaacatttcgagcaattcgaaccaatttatatcattagtggggacacggattttccaacggaaactgtaacagattattatttggaagctttagaaaccgtttctaaaaaagcgccacacgcacttaaagttttgcatatttgtggtcgattaaaagatattccggaaaatctgcaaacacatccagcacttgatttgtatttttatcaatctggacataattcggagcaccaatcaatggcctatacgttggcagaacactttagtcagttagagccaatcaagccagttatcaattcagaaccgtgttacgaattgatgggatatagtcgacaaaaatatggtcgttttagccgagaagatgtacgaaaagcagcttggcaaagtgtcttatctggtgctatagctggtatttcttatggggcacatggcatttggagttggcatgaagaaggaagtacatttggatcagctctaggtgaaggatttgtttctccatttaattggcgacaagcacttcattttgaaggagctacagattatgcatttctaaaatcctttattctggctaatgacttaacaacactggcaccaataaatctagttttaaatcaaactccagaaattcgagcagcggagaccgaaaaagtagttatcatttatgtgccatcaaatgtcccaatttatttgaaagggcaatttgtttctttggatgactatgcgattgatttggagcaaggtaaaaaggttagcctcgcaaaaatacttcatgaagaaaaaacagaaattcagatgactccttttttgaaagatagcttatatgtaattcacaaataaattccaatttctttctggaaaaaataattttgtttaccaataaaaactaaagcgagaccactatttcagcgtggcctcgcttttggcttttacagaagtttgttctaatttttgcttaacgaatttaagttgtgcgacgattattatactaataataacaagtaaataccaactcgtaatttttgaaacgtgcactggacgccatgcaactagctggtctggataagaccaagctccgtaaaaactagcaatgttctccgcaagatagatgaaaaaagcaatgcataaaaaggaaaaagataaaggcattttgagctgagtcgaactaactttgaaataaacatatgtctttcggaataaaacgagaactaaaacaatcaaaatccagcgaaaatccattataaaatgatgcgtgaaaaaattagcgtaaatcgctatgcaaaggctacttactaaccagatatttggccaatttgtcattttaagatcaaatcttttccaagcctgacaaatataactcgccacacttgaatacataaaaccgctataaaggggcacgccgaaaagtttcattaaaccaggctctggataactccatgaccccatatgtactttatagatttcaagtccaagtccaataatatgaaaaaccataattaccttaagttcatcccatgtttctaaaccaaattttataagtagcacttgcgttgcaagacaaataatcaaaagtaagtcataacgtgcaataaaaggaatatcaatcaattttgtaagcgcgagcgaaataaagataatacctggaaaaatacaacaaagtgcttgcttccaagtaaacacccaaagtaagcggaaaaattgcataaaaaaacctcttctcatgattttctctagtttaccaaaaaaaactaaagaaaaggacaagaaaaggttaaaaaagttcattttgatgattgatatttctaaatggggcatcttcttcaaatgctaaaggtttggtatggagtttttcgagtaaagctctgacacgatgttgctcatcttgtagtaagtgatgtagcacttctcgtgagtagggaatattggcaaccaaatagtgatttgcttgcgctgttttagcaaaatgattaggataatcagccagtcgtccaatttcttttggagtcaaaaaaggcatatcgacaggaagcactaggaaattagctttctgataagcatttgcttctaccatcaccgcataaatgcctccaagcggtccaaattcactgaatgcggtttgatctggaatgatttcaatgcttggttctgcatcaaaaagagccacgagttttgaatgattttcatgatttgccgatacaaataccatatcgcaaagcggcagcaacttactaaccgttagctcgacccacgtttttccagttgcctcatcctgaaaaaacgcttttggttccccaaaacggcttgagcgaccaccggctaatacaatgccgacattaactttttcgtttttcaaggcgtccctctcgcataactaaaatttcttcggtcatcatttctgcttccgaggcataatgcgtgacaaaaataacgggaatatggaagtctttggccatttgaccaactaatttcatacaaatcaaacgcgtttcttcatctaaaccattgaaaggttcatccagtaaaagtaattttggctccgtaatcattgcccgagccatcgcaacacgttgtttctcgccaccagataatttctgaacggaagaataaagcaggtgagaaatttgtagataatcactcatttttcgtacttgttgctgaatttccgcctgttcttttttcttctttttcttcactttcaagccaaaagcaatattttcatagacattcatatttgggaatagagctaaattctgaaataaataacctactttgcgctctgtcacaggaagatgtaacgaaatattggaatcatcccacggagtcccgtcaaattcaataatgccgccgtcaatacttttcaagccactaacgcactgaaatagagttgacttgcctgaaccacttgcacccatcatcgcggttactggcttttcaaacgtataatcaatatttaaatcatgaaaaggaagttttttatgaaattgtaatcgtagcataattacatccccctcgttaaattactctggcgtatagttaatacatgaatgacaagtaaagcaaacacgccgattatgacgttaattaacccaagataaatcgcagtacgcatgtctccttgttgcaccataaaatagatgcttgaagcaatggtgtcggtcttgccttcaatataaccagccaccatcaaacttgcaccaaactcacccatcgcccgacaaaaactaagcagaacccctgctaaaattggttgccagcaattcggtaaaataatttttgtgaaaatctgttttttattcgctgaaagagtctctgctgcccatacaagttcgtgatcaattgataaaaatgctgatttcaagccttgatacataattggtaaaataataatcgttgttgcaacaattgctccactaagggaaaaaataaagctgaaatcaaaagtatcccaaagcacgccaccaataaaatcattgcggccgaggatattcagtaaaactaaaccaaccaccgttggcggtaaaacaagcggaagtaaaattaaaatctccactggtaactgaaaacgtgattttcgaccggcaaaataataactcagtggtaacatcgtcataaatgcgagaaacgtagaaattgtggctacaagtaatgtatgccaaacagatgtaaacataaatctcctcctgaaccctctagtacttctattattatcgttctctctggtataaaatgtcaaacttaagtacaatgtaactaaataaaaaagggggatgaagaatgaaaaaaatagtacttattatatgttgtggattattactacttctcggagcttgcgaggatacgcctgagaaagtccaaacaacgactatacatatttcagcagcagcaagtttaaaagattcgatagacgacgtaaaaccactttttgaaaaagccaatccaacgattaaattatcttttgattttggtggttctggacaaattcgcgaacgtgtcgaaagcggggcaccaattgacggcgtccttttagcgagtaaaaaagatgcagatacactgattaagcaaaatttagcagaaaaaacgaaagaatttgcgggaaatgaactcgttttaattgaacctaaaaacgtggatcagaagacagaggcgaacttagaacaattactaaatgacgcatccaaaatcgccatcggggacccagaatcagtaccagcaggtgcttatgccaaacaaacgctcgaaaacctaaatctatataatgcagaaaaagcaaagcttgttcttgcaaccgatgttcgtcaagtcttatcctacgtggaagccggaaatgcagatgcaggcttcgtttaccagacagatgctctattaagcaagaaagtacaagtgaaggcaaaaatcgatgagaaactccatgatccaatcgcttactacagcgcacaagtcagtgattcagataaaaaagaagaaaccgctacatttcttgattttatgaataaatcagaagcgcaaaaaatactggaaaaatacggattcaaagcagcaaactaatgagaagtcgctttactttttaaaacaagcaaactcctgtatattggtactaaagaaaacgcatacatttattgtgaaagggaagtgcgcccaaatgattgaaaaaagaaataccattagaatggaacaagcgagagaagtattatgtaaccaaataacgcatcttccagtagaaaagaaacatgtgacagaggcgttaaatcaagttttacaagaacctattttcgcgccgtttcctgctccatattttaggcgttctggttatgatggctttgcgattactgaggtggatgacgggaattatcctatcaccttgcgcgttgtagcagaagttccgtgtggagaaacatacgataaaccgctaaaacctggtgaaaccgtccgaataatgactggggcaaaagtgccagataatgcctcgaaaattattatgcttgaacaatcaagagaagcggataacgagaatgaaatcatacttataaatacacaaaaatctagtaacattacagaaatcggtacggagtttgccaaaggagatttgctgttagatcgtggacacattttaaatgccggttcgataagtttactgtcatcctttggaattcaagaagtacaagtcatcagaaagccaaaagtagctattttatccacaggtagtgaacttgttcctgctggaaatccacttccagatggcaaaatttttaatagtaatcaaccgttactggagaatttactaaaagtacatcatgccgagatttgcgctgccgaacaattacctgataattatgaggacacgaaaaaccgtttactagaattgactaagatagcggacttaatagttactacgggaggtgtttctgtaggtgattttgactacatggctgatattgcaaaacaagaagcagaattactttttaataaaattcaaatgcgaccaggcagtccaacaacagggatgtggttggataaaacgcttatcatcgcgctttctggcaatccaggggcatgctttacaggtttttacttattagtagaaccagtattaactaccttaatggggaaagatacaactgagacgactcaagtccgtgcaaaaatggcgagcgattacaccaaaaataatggctatgatcgttttttacgaggaacctatcgtttgtctgacgaaggggaatatttggttgagttggttggtagcgacatgtcgagtgcgctcggtaatcttcatttaacaacctgtttattcaaaatcccacgagggcaagtagggaaattaaaaggagaagaggtcgaagcatggctgctatactccaaataatcggttttaaaaatagcgggaaaacaactttactaaatgcattaattcgcgctagtcggaaggaaaactacacagtatctgccatcaaacacgatgcccatgatttttctgtagatcacgcgggaacggattcctactcgtttcaagaaagtggtgcagaagctgttgttatcgcgaattcgagacaatatgctgtgatggaacaaaccggtatcgatttaaaaacagccattcaaaagttgccagaatcagatatcgttcttatagaaggctacaaagaaggtccttttcctaaaattattttggttcgcgaacaggcagaaatcgaacttttaaagaatagtaaagctgtccataaaattgcgacacataatccagcgctaaaaaaagaagcgatttttattggagaagaaaatgctttaaacctttttgcagaaacgttaatcaaggagtttttaaaatgagatatgtagccttacaacatgaaaaaattgaaattggcccactttctgaaaaactaatcaataaaaatcacggtgggactaatctttttgttggtacaattcgagaatggactggtgatatccaaacagaagaaattcgttacacatcctacgaagaaatggcgctcaaagaactaaacaagttggctacagaggtagaagcgaagtggggagcagatgtagttatcgttcaccgactaggacttttgcaaataaccgatatcgctgtggtcattggcgtatcgacaccacaccgcgccgcttgctacgagggatccagatatattattgaacgtttaaaagaacgtgtacctatatggaaagaagaaaaagacgttgataaaacaaggtggggtggcatcaatgctcacaacagttaaatttttcgcttttttagctgaaaagacacataaaaccgaagtaaaattgaatttgcagcagtgccagacagttggcgaggtccgagaagttattagtagtgagtttcctgaaatagccgtagatttggcaacatgtatgctagctgtgaatatggaatttcaacaagatcaagattttttaccagaagaaataaccgaaattgcagtcattccgccagtaagcggtggataaggagggaaccagatggaaaaagatgatttgacgcattttaatgatgaaaaacgcgcaaaaatggtggatgttacaagcaaatcagaaacaaaacgccgtgcaatcgctagcgctacgatacatatgaatgaagaaacgttagcacgtatccatgctggtaaaattgctaaaggagatgttttagctgtcgcacaagtggctggaatcatggcggctaaaaaaacaagtgaactaattccaatgtgccatccgattatgacgacgaaagctgatatttcttttgaagatgatgggaaaactgcgctaactatcacatctgaagtcgtaaccgttggaaagacgggcgtagaaatggaagcactcacggcagtaaccattgccgctctaaccatttatgatatgtgcaaagcaatggataaaggcatgcgcatcgaaaaaacctatttagttgagaaaactggcgggaaaagcgggacatttaaagcagaagcgtaactattttgtaggataggagttttgttttatgcaattattaaaggataaatttgggcgggtacacgattatattcgtatttcagtaacagatcggtgtaatttaaggtgtgtgtattgtatgcccgaagaaggcctgacatttttgccccatgaaaaagtactatccaaagatgaaattgtcagttttatggaattaatggtgaaattcggcatcaaaaaagtacgcatcactggtggagagccattacttaggaccgatattgtggaaattgttcgcgggcttggagcaattcctgaaatagaagatatttcgattacaaccaatgctatgtatttggcgaaaaaagccgaagcgctgaaggaggcggggctcacacgtgtaaacatcagcttagattcccttcacgcagatcgttttaaagcaattacacgaggcggtcgtttgcaaaaagtactcgatggcattcaaaaagcagaagaagttggattgtttccaattaagcttaatgtcgtcctaattaaaggacaaaatgatgacgaaataacggatttccttcgatttacaaaagataaagatattaatattcgtttcattgaatatatgccaattggtcatgctggtacgagttggaaagaaaaatatttgccgctggatacaatttttgaggcttgtaatgaagctggttatgagtatgaaccagtggactcaattcgtggaaatggcccctccgaaaatttccgtattaaaggagcgaaagggacgtttggtgtgattcacccggttagcgctcatttttgtgatagttgcaaccgactcagacttaccgcagatggttatattaaagcgtgtttatactgggatgaagaaatgaatattcgcccatttatccaagatccagtcaaattaatgcaactggtgcaaaaagcaattgataataagcctgaaaatcatgaaatggcattaaaattacaagatgaagtacaatctaataaaccaacttggcggcgtatgagtcaaattgggggataaataaaacatccggtcgcatgtgcggccggatgttttatttttgtcgttctgctattaaatgaggtaattctgggataatcaatttttgaaccgcgagctggcaagcattacttgatccaggcaacgcaaaaagcagtaagccgctttctgaaaagccagcgaatgcacgagacaccatggcacgactaccaacttcttcgtaactgagcatcctgaaaatttcaccaaacccagggatttcttgctgaatcgttgcgaataatgcttcatatgtaacatcgcgcctagcaatgccggtaccaccatttgtgataagacaaaaggacccattagctgctaactcgtttattttttgcttaatgagcgtaacatcatcaggaacgacaacccgtgaaatcacctcatgcccagctgtttctaaggcagattgaatcagttgaccactagtatccgtatccaaattccttgtatcactaatcgtcaaaatactacaagtcaccttaataaatgtcttttgttccataactgcctcctttagttaaaaaataaatgatatattttcttagcttctgctatattttctgatccatgaagtaacacacgcccatttttaaaaataacaaattgaaacttttcgtattggaaactgagtaaagcggggttttcattataaataattttttgttccgtcagcagtagtttaatctcgcggtaattacttttatttggtaaacgaaattgtactgtatcacgcccgcaaagagtaaccgtttgcccggaaaaaggaacttctgaaaccatttttccaggtgcgcaactagagcaatcgggacgttttttgacttcgatagtttggaaagaaaagtgccaattatctagttggtagtaggtatttgctttgaaatcagggttgataatcatttgagtaagtagggaaacttgcatgccggcgacgattggaatcagcgcaccatcaacgccaataatatcgcaacttgctgcgttggtttggggaatatcaccaagtaaacagtgtaaacaagcagagtcaggcggaataattggcatgagattcgcgtaatttccagcacacgaggtgaaaatccacggaatttgatggctgaaacaaaactgatttaaaaagtcgcgggtcataaaattatctgtacaatctagtatgtaatcaattgtcccaacataaggcgttaaactcgttacgttcgcatcatctacaatatattcgattgtaatatcgctattaatgagttgtaaagctttagatgccgcatacgattttgcttgcttgtctaacgcatcttgttccgtgaaaagcgattggcgttgcaaattacttagctccacatagtcacggtcaattaaaattaactttccaaagcccattcgcgcacaaatttctgcggcatatgacccaatcgccccaactccaacaatcaaaatcgttttcgtaagtaatttttcttgaccatcttttccaatatttttaacgcgcatctgtctatcataacgttccaagtttccaccttctttccaatcttattttaccagataattgcataaagcgcttacttgcaaggtttaagtttattgttgaattcctgttacgacatctttataatgaaagaaaaaactagaggtgctaactatgaaacagcgtgtagaaacagaaaaattttatccagcttatccagtttttgtattaacgtatttgaatgagattggagaaccgcaaatgtcaacgggatcatcatcgtacacattaggagatagtatcgttatcggcgtgtcagcagaaagtaatgcgggcaaacacttgcatgctggccaaaaattcgcagtaaattttccaaatacagagcagttaggattaattgaacaagggggattctcgtcgggaaagcgtaacgataaaataaaagttcatcaaatcgaattaaccaaaagtgatagcgggggagtagcttatatagatgtgtgtccgattgttctcgaatgcaccgtgattcaaacagtttctgacatggactatcatacaatctttgctaaaattgactcgcgattatttgaaaaaaatttagtggattcagagggtcattttattcacgaagaacttgatttagtgctattctcaggcgatgcaaatgaacgtaaattcagacagttggatgcaaaaatagaaacaattggtggccattcataaagacaaaaatccccacaggatcttaattcctgcggggatttattcaatttaaccaaatacgtccacatctggtggcaagtaagatggattttctttattaatatgatcataaaacataataccatttaaatgatcgatttcgtgttgaataacaatcgctggataacctttgaagcgtaatttgagcggtgtaccattttcgtcaaaggcatcaatggttacacgttcacttcggaccacataacctggaacttcacggtcaacagaaagacaaccttcgccaccagaaagacaagcttgctgcacagaatggctacgaatttttggattataaagcacataactataaagacgatctttttcatcatgtacatgaatagctaggaaacgtttagtcacagcaagttgtggagctgcaattccaacgccaccacgcaacccgtatttttctgctaaatcttcatcttgactgttaatcagaaattcgagcatatcgcgtcctaattttttttcttcatctgaaagcgggaaagtcacttctgtcgcaacttctcgaagtgctggatgaccttctcgtacaatatcgtccattgtaagcatgatttgattctctcctgttctttaataacttatctttattttaacaaaagaacgaaaaaaaaggaatgaaagattaccaggctcgaaaaaaagagtgttttaataggtctaaagacatatttgttaaaaaagataaagttttaaaagcgaacaataactattattttttaaaaaatgttcgtttaaactaaacgaagaaaaaatttatatgtttgtgaattcacaaactatcgatatttgctgtttgaaagtttgaaataggtgtgataatgcgagagttgcaatattatataacagtttttatctgtttcatctttttttaatacagaacgggaaagcgaatgatttaagtaataatgccattgtaagcgataaaacaaatagagattaacttattgacttcataatcttggtagtgtaaattaagagagaagattagtgtattaataaaattcttgttttcgagtaaaacagaaataacattttaaataaaaggaaagttcctgtttttttatgaaacattgtgaaagaatgaaagttttttcacatactctcttaaaacccatgttttcaatgaggaatttgtggtaataactggagaggctacgtaattagttaataggaatttagaaaaaagcttccggaatctgcttctttctatagaataacttttctttttactacgctattataattaatacacaatcaggatggcagttttaaaaaaaccatctagtaaggtaaatgaccggacgagcgttacataaaacgcatacctaactaatgaagaatttgaaactgtacaatgtgaatgacgaaagggtggatacgaaatggcttctaaaacaaagaaggctattatcgacgtaaagaaacaatttgaggctgttcataaacaatttgaattggttcaaattttgaatgaaaaaggagaaattgttaatccagatttaatgccggatttaacagatgatcaattagtagaattaatgactcgtatggtttggactcgtgtacttgaccaacgttctatctcacttaaccgtcaaggacgtctaggtttctacgctccaactgctggacaagaagcttcccaacttgcaagtcactatgcacttgaaaaacatgactatattcttccaggataccgtgatgtgcctcaacttatctggcacggacttccacttacaaaagcgttcttgttctctcgtggacactttgtaggtaaccaattccctgaagatttaaatgtattatcaccacaaatcatcatcggtgcacaaatcgtgcaagctgccggtgttgctctaggtcttaaaaaacgtaaaaaagatgctgttgtaatcacttatacaggtgatggcggttcttcccaaggtgacttctatgaaggaatgaactttgcgggtgcttaccatgctccagcgattttcgtagtacaaaacaacaaattcgcgatttctacacctcgtgaaaaacaatctgctgctgaaacattagctcaaaaagcagttgcagctggaatcccaggcgtacaagtagacggaatggatccacttgcagtatatgctgtaactaaattcgctcgtgaacgtgcagttgctggtgaaggcccaactctaatcgaaacaatgacttaccgttatggtccacatacactttctggtgatgatccaactcgttaccgtacaaaagaacttgatggtgaatgggaacttaaagatccaatcgttcgcttccgtactttcttagaaggtaaaggcctttggaacgaagaaaaagaaaatgctgttatcgatcaagcaaaagaagaaatcaaagtagcaattaaagaagcagacgctacaccaaaacaaacagtgactgatcttcttaaaaatatgtacgaaacaccaactgctcctatcaaagagcaactggcaatctatgaagcgaaggagtcgaaataatcatggcgcaaaaaacaatgattcaagcgattacagatgcgcttgcagtagaacttgaaaaagacgaaaacgtattagtttttggggaagacgttggtaaaaacggcggcgtattccgtgcaacagaaggattacaagaaaaatttggcgaagatcgtgtatttgatactcctctagcagaatctggtatcggtggtcttgctatcggtcttgcacttgaaggtttccgtccagttccagaaattcaattcttcggtttcgtatttgaagtaatggattctgttgctggtcaaatggctcgtatgcgttaccgtacaggcggaactcgtaatgctccaatcacaattcgcgcaccatttggtggcggcgttcatacaccagaaatgcacgcggataacttagaaggattaatggctcaatcacctggtttaaaagtggtaattccatccactccatacgatgcaaaaggtcttttaatctcagcaattcgtgataacgatcctgttattttcttagagcatatgaaattatatcgttctttccgtgaagaagttccagaaggcgaatacacagtagaaattggtaaagcagctgttcgtcgtgaaggtacggatgtttctatcatcacttacggtgcgatggtgcaagaatcaatgaaagcagcagaagctcttgaaaaagatggcgtatctgtagaggttatcgatttacgtacaattagcccaattgatgtggaaacaatcattgcttccgttaagaaaacaaaccgtgctgttgtagttcaagaagcgcaaaaacaagcaggtattgcagctaatatcgttgcagaaattaacgatcatgcaatcctttctctagaagctccagttatgcgagttgctgctccagatagcgtattcccgttctctcaagcagaaacagtttggttaccaaatcataacgatattatcgaacgtgtaaaagaagttattgcattttaattcataatgaccgttttaaaacttatggggagttttagaaggggaaagaaatatttttatactaaggttcagtttatctgaaccttagaaattacaggaggcttaataaaatggcatattcatttaaattaccggatatcggtgaaggtatccatgaaggtgaaatcgttaaatggtttgtacaaccaggcgataaaattgaagaagatgaatccctatttgaagtacaaaacgacaaatcagtggaagaaatcacttctccagtttcaggaacaattaaagaaatcaaagttgctgaaggtacagttgctacagttggacaagtactagtaacgtttgatggcgtagaaggtcacgaagacgacgccgaagaagaaagcgcagcaccaaaagcagaatccacagaatcaactcctgcacccgcacaagctagcggaaaaggaatttttgaattcaaattaccagatattggtgaaggaattcatgaaggtgaaattgttaaatggtttattcaaccgggcgataaagtagaagaagatcagtccatttttgaagtacaaaacgacaaatctgtcgaagaaattacttctccagtagatggtactgttaaagatattttagttagcgaaggaacagtagcaacagttggtcaagtattagtaacattcgaaggtgattttgaaggagaagcaagccatgaatctactccagaatctccagcagaagacgctgcacttgctaacaacgatgcaacttccgcaccagcaacaggtggaaacggaactccatcatctaaaaaagatcctaatggccttgtaattgcaatgccttctgtacgtaaatatgcgcgtgaaaaaggcgttaatatcgctgaagtagcaggctctggaaaaaataaccgcgtagttaaagctgatattgatgctttcctaaacggcgaacaaccagctgcagcaacaactactgctcaaacagaagaaaaagcagctgcaccaaaagcagaaaaagcagcaggaaaacaaccagttgcaagctccgatgcttacccagaaacacgcgaaaaattaacaccaactcgtcgtgcgattgcaaaagcaatggtaaactcaaaacatacagctccacacgttactttaatggacgaaatcgaagtaactgcacttatggctcaccgcaaacgtttcaaagaagtggctgccgaaaaaggtatcaaacttactttcttaccttacatggtgaaagctcttgttgcaacgcttcgtgacttcccagtgcttaacacaactttagatgatgcgacagaagaacttgtttacaaacattacttcaacgttggtatcgcagcagatacagaccacggtttatatgtaccagtaattaaaaatgctgacaaaaaatccgtattccaaatttctgatgaaatcaacgaactagctggaaaagcacgtgatggtaaattaactgctgacgaaatgcgccacggttccgcaactatttctaatatcggttctgccggcggacaatggttcactccagtaattaattacccagaagttgctattctaggtgttggtcgtattgctcaaaaacctatcgtaaaagatggcgaaattgtagcagcaccagtactagctctttccttgagctttgaccaccgtgtaattgacggcgcaactgctcaaaaagcaatgaacaatattaaacgtttattaaacgatccagaattattactaatggaggtgtaacaaaatggtagtaggcgattttccagaagaaagagacaccatagtcatcggtgcaggcccaggtgggtatgtagccgcaatccgagctgcacaactcggacaaaaagttaccattattgaaaaagaatattacggcggtgtgtgcttaaacgtgggatgtattccttccaaagcacttatcacaatcggtcaccgttttaaagaagctggacactctgataacatgggtattacagcggacaacgtgaacttagatttcacaaaagcacaagaatggaaaggcggcgtagttaacaagcttacatcaggtgttaaaggccttcttaagaaaaataaagtagaaatgttagaaggagaagcgttcttcgtggatgatcattccttacgtgtgattcaccctgattccgctcaaacttatacatttaacaacgtaatcattgcaacaggatctcgtccaatcgaaatcccaggtttcaaatatggtaaacgtgtattaagctcaactggtgcacttgcactaacagaagttccgaaaaaattagtcgtaattggcggcggatatatcggaacagaactaggtggagcattcgctaaccttggtacagaactaactatccttgagggtggtccagaaatcttaccaacatacgaaaaagacatggtttccctagttaaacgtaatctgaaaagcaaaaacgttgaaatggttactaaagcacttgcaaaatctgctgaagaaactgaaaacggcgttaaagtaacgtatgaagctaacggtgaaacaaaaactatcgaagctgattatgttttagtaacagtaggtcgtcgtccaaatacagacgaaatcggtttagaacaagctggcgttaaagtaacagaacgcggtttagtagaagttgataaacaaggtcgctcgaatgtttctaacattttcgcaattggtgacatcgttcctggtgttcctctagctcacaaagctagctatgaagcaaaaatcgctgctgaagcaattgctggcgaaaaatccgaaaacgattatacagcacttccagctgtcgttttcagtgatccagaacttgctacagttggtttaacagaaaaagaagcaaaagaaaaaggctttgatgtaaaagctgctaaattcccattcggtggtaacggtcgtgcgctttctttagatgcaccagaaggatttgttcgtctagttactcgtaaagaagatggcctagttatcggcgcacaagttgccggaatgaacgcttctgatattatttcagaaatcggcttagcaatcgaatcaggcattacagcagaagacatcgcgcttactatccacgctcacccatcactaggagagcttacaatggaagcagccgaacttgctttaggtcgcccaattcatatgtaatcaacacgaagcggagatactcttttttgggtatctccgcttttaaatatagaaataagtgcgtattttcacaaaaacactttttagttcattttttgaattatttaaagtatccgttttagaaaaaaaggagtataatgtaacaagtgaacgtaaaaagtcaaatctaattgaatcaggtgaaaaaatggagaaacaaacagcaacttggaagaaagctctattttggtttgcgtatgtagtagcaggaatttgttttgtattgacaatcgtagcctttggagtaggtttctttcatcatatgcatgatacaggtggatggcgctcggttattcaaattctcgaaacaccaatcactggctttgtcaaaatgactggtggctatatcggtaaagggattttagaagtaattattctgattatcgttagttatgtactaccaatcttcttctgttttgcaacgcattatttaaaagtgaaacgacgtgaaatgacttaaaataagattattttgtaaaaagcaaagcgaatgagcattgctttttatttatttggtcaagttattttatttttgcctcggaagcatgctaaaataacaataagagacttgatgaggaggagacgcatatgccatctaagaagaaaaaaattgtcgttatcggcagaagtaatctacaaaatctctacattcatacagttcttttgaaaaaattaccagccgagatttacttaatagacgatcaagcgaaaacaagcgtacaagattttgattatgcgagttattatcatgcagatgtgaccattcactcaggaacattcaatgagtgtcgcaacgctgatatagtcgtcttttttcaagaagaaatgtccaatcaaatcgtttcaaaagaagataatgtcgcgctaatcatagaaaaagtgaagaaaatgatggcaactggtttccgaggaattgtcttagtggcaacagctgagagtaatgtcgttgccgcgttaattaaacgcttctccggtttatcagcaaatcaaattattacgcttggcaccatgcttgcgacgtcttattttcaagtggaaattgctaaattatttaaaatcagccctaaaaatgtacacggatatattattggtgataatgcagaagatgtcattcctgtatggagcagggctttccttggtggcaaaccaattttaagttatttagccgaagatcaaaaaagaatctcagcagaggatttacaaaatttaacaaaaatgattactaaaattccggattttccttttgaaaataaagatggttgtactttccgatttagcactgtaactgttcttgctgaattaaccgaagtcattttgcgcgacgaagcaagagttatcacagttggtgttgaagtgaaagaagcatacggtttagaaaatcctgtcttcattagtgtcccagctgtcattggtgcagaaggagtcagagaactacttgaattaaatctctcagacgatgaacaaaaagaattaaaacaaatcgccgcaaaaaccaccgagaaattggaagaattgcaacttaacaaaggagggattagttaatggaatacagttatccactaaatccagactggacaaccgaagaaatgacgattgttgtacaatttttagaagctattgagcgagcgtatgaaaagggcatagatacgcttgagctcaaagaaaaatatcgagcattcaaacaagtagtccctgccaaaggagaagaaaaacggattggcatagactttgagaaagccagtggctattcggcctataaagtcatgcaacttgtaaaaaacgcaactactagtaaaataaaaatgcaaccataattaagaggaggaatttttttcatggatattagtcaaattaaagcagaagtagtaacaccagaaactggaatacacgtaggtgaaaaggcagcgcccgttaaagtaatgtctttcgttaacttacgttgcccattctgtcgtgagtggaatgaaaaatccaaagacgttctcacggaatatattcaagcaggaaaaatcgaattaattattaaaccatttgataaagagaaagaatctttacaacgaggaaatgtgacgcatcgttatttagattattcaacaccagaaaaaacacgtgaaacaatcaacaagatttatagcaagcaagacgagtggggtagcctttcacttgatgaagtagctacttatatggaatctgaattaggcctaacagagcaagacaataaagctgcatcagaaaaaattgtcgcagaagcaaatgcagcaaatgttgtttttgtaccgactgttattgtgggtgaacatatttttgatgagcatattagccctgaagagttacgttcgctacttgatgatgaattagctaaataattaaatagaaggaatccagttgatagaagcaaatgtcacaatttgcgctatcatctggattctttttttgtgagaaattgaataactccatgcaaactccatctttattttatataataaaaagaacagtaggaggcaaatatggaaaaaatactcattgcagaagatgattcagctattttaggagttattacagcattcttaaccgaagcagggtatcaagtaatgacagctaaaaatggaatagaagcatatcatctatttcaaaaggaaacatttgatttaattattatggatattatgatgccgagtatggacgggtacacactaacagaactgattcgttctacttcaaccacaccgatacttatgatgacggcgctctctgaagaagatgacgagttgaaaggctttgatctaggggcggacgactatatacaaaaaccattctcttatttagtattattaaaacgagtgcaagtacttttgagacgagtgaaccaaagtgaaacaaagaagcaaatactacgatgcggaaatatttctgtagataccgaaacctttgaagtgatttcagctggagaaacaatcgaattaacgaaaaaagaatttgatattttagtactcctgattaaaaatcaaaagaaggtgattactcgtgaaatgatattgtcacaagcatgggatttcgcagctattgtggatacgtccattatcaatacgcatatgaaaaatctacgcaaaaaactgcacactgaaaaaattcaaacgattagaggtgctggctataaaatggatgaataaagtgagaaccagaattagttggaaaattttcttaatatttgtgagtatcattttactttttacggctctagtctatgccatgctaatctttttcttaccacaattttattatgattataaaataaaacaaattaatgattatgcaaatgaagtcgtaaaagcaggcgaagcggatgatattgaaggtgtggaaaaagcactaaatgattttatggaaaatacaaatattttaccaattttaatagatagtaatggaaatattgtttatataccaaatgtgaatatggcatccattaaatcagcaacatcgactgttgtagacggcacgaaagcagaaggtggtacaactgcaacggattattcaggtggaacagaaacaaaaaataaacctatttctatcaatggtcaaacctacaatctcacctatacgattaacatccaaaaaattaatgatatttcgaccgtcctattacaatttgctccttactttattttatttgcatttatattaagtttattaaccgcctactttttctcccgcagaatggtgagacctcttttacgaatgaataaagttgcctccaaaatggcgaatttaaactttacagaagtacttccgattacatccaaagatgaaattggtcagctttcgggaaatttaaacgaaatggcaattaacctagaaaaaacgatgcttgaattaaatgaagtaaataaaaaattacaaaaagaaatagaaaaagagcgtcaactcgaggaaatgcgaaaaagttttgttacagctatttctcatgaattaaaatcccctcttgctgcagtaatgggtcaagtagaagcaatgcgttataatgtagctccatatgacaatcatccaaaatacttacaagagtcataccagattttggaaaagatgtctcagatgatacaagaaatgttagacgtatccaaagttgatcaaacaaactatatgatagagaaaacttctttttccttaactgaaatggtggagaaaattatctatagtaaaaaaatggtaccacatcgtctgtctcaaaaagttgtttttcaagtgaaggaagatgttacagtaacagcaaattatgcctttatcgaaaaagcaatcgaaaatatttttgagaatgcttttaattattctaaagaagaaacaaccattttagttgaaattcaaaatcgggaaaaaggtttctatttttctgtgcataataaagctactagtattcccgaagaagaattgaacaaactatttgagccgttctatcgccttgagaaatcaggtaacaaaaaaacaggtggaaatggtttagggttgtttattattgcaaaatttttagatatccaaagaatccactacaaacttattaatgaaaaagacggtgttacttttcaaatatggcaataaaaaaacagcaaaaaaacaggtagagtccatgtgaactctacctgttttttatatgcttaattatattaagaaacggaggttagaaaatggattttatcagaagagcctttattagtattaatgctaagaaagggaaatcgcttgtattatttacgctattattagtcattttcagtttagtttttacaggttttgccattcaggaatctactaaacaaagtgctgaatcagcaagaaaacaacttggagcaaacgttactctacaaatgaatcaagaggaaataatgaaaaaggcgcaaagcggggaagaaataaaggaagaagatttatcgattccaaccgaggatgtaaataaaattaaaaaattgccacaggttgacaattatacaattagctcagaaggttccgcatcaaaaggtgatttaacaccaatccctgctaaaaaacaagaaggtggccaagggggcatgacccaagttgctggaacagatacaaatgggaaaaaggtagaaaccccaagtttttcagtcaaagcagtaaaccaaacagctactttaaacagtttcaaagataaaacagataaaattatttctgggaagccattaacatcagatgacaaagaaaatacagcgcttattgaaaaacaattggctaaaaaaaacaatcttaaagtaggcgacacctttcaactgacgaatgataaaaagaaaaaagtgaagtttgttgtcaaaggtatttatcaaagcaatcaaaaaatagaacctcaactagaatcatttcaaatgatgctccctggaaataaaatctatgccaatataaaaggagcaaaagattttctttggagtggaggcattgaaaaagctgaatttaatttaaaagatccaaaagaaataaattcatttatctctgaagcaaaaaaattaacggatgtagataatggagatatgttccaatttgatgcacaaaacagtgcttacaaaaaaatgattggaccgattgagcgagtggcatcttttagtaatattattgtgatgattacacttctggctggtggcttaatccttgcgcttatcgtattactatccattcgtgagcgtaaatttgaaatgggtgtgcttttatcacttggggaaagtaaaacaaaattaatgagtcaatttttagtagaagtattaattattgcagcacttgctttttctttttcttgtgcattggctaatccaattggccaagctatctctaaccaaatgctttcgactgaagtcacgaaagaagcaaataaagagaatgaaacttccacacaagaaagcatggcaatagctctaggtggggaagagaaaactaaggttgatgcggagccgattgataaaatagatgtcgtgattacaagcaatataatggggcaagttggtgggcttggttttattttaatattcctagcgacaacgataccgtgtttatttatcattcgactacaacccaaaatgctatttactcagaaagattaaggagagacttaaatggaaactaatttagagttacaggatattacttatcagtacgactcgggaaacaaagctcaaattgttttaagaaacctttcttatacattttcagaaggaacattttatacgattttaggaccatctggtgcggggaaaacaacattactttccattgctgccggtattgataaaccaacctccgggaaattaattattaataaaaaagtattaaacgaaacaatgagtttacagagttatcgtaaaagtctaagctcaattatttttcaaacgtataatttaattccttatatgacagctgtacaaaatgtctatacagcgatgggaatacaacatagtcaaatgaaagataaacgcaaaagagctattgaattgctaaaggaagtagggttgacagataaacaaattaatagtccagtcttaaaattaagtggtggacaacaacagcgcgtaaccattgctcgcgctttatcaggaaatgcgccatttatttttgcagatgagccaaccggaaatttggatcatgaaacctcggaacacattattgatttatttcgtgatttagcacataaaaagaataaatgtgtcgtcatggtcactcatgataaccatgtagctagtcgttctgatgttattttgaacttaaaaggaaaaacattaatataaatgaaataaaaaaagcgaatgtattggcctaaaattttaggtaatacaatcgctttttgtttatttttaaaagaattttctccgccagaatacaatcgcaagtgctccagcaatcccgaatgcaaaaccgagcgtaagcatccaagccattggtgtattcataaacggtaatttcacgttcattccgtaaaaactaaacaccatcgttggaatcgtcaagatgatggtaaaagaagtaagaaatttcatcacgatattcatattgttcgagataattgaagcataggcatccatcatcccgctcaaaatattcgagtggacttccgccatttcaataccttggcgattttcaataataacatcttctaataagtcttgatcttcttcgtacattttaacaatattttgacgcatcattttatctagtacgactttattcgatttaagggctgttacaaagtaaactaaacttttttcaatccccattaaatcataaagttgtttatttttcatagattcatgtagttctttttcgatttcgtccgtttgacggttcaagcgttttaagtgacgcaagaaagtagtggaaatcatgtataagatttgcaatgcaaaccgcgttttcatatgtgtataaaagcctttaatacggtttctaataaaggactgcacgatagaagaatcgattgtgcaaattgtaataaaatagtcttttgtaataattatccccattggaatggtttcgaatgaagcgtaatgaatatcatcttcatcgactaccggaaagtcacaaacgattaaaacagaatccgagtcgtcatcgcgttcaatccgggcactttcatctttatctagtggatcttctaagaactcaagtggaatttcgtagttatcggcaattttattaatttcttcggaagttggagcaacaatattaatccaacaattgcgcgtcacttcttctaattcaattaatttgccgttttcatctgatttgaaaatttgatgcatgctttttacctccttttttaacaggtaaatttcacgcggttagagtttcgttcccgtgaaaaatcacctgtatgaatacttcgatgtggaccagggtcacttgctgtttgctgctcctttttcacgttcctcaactccttcaaatcatagtaattcacaactctaccattatacctagattatagtcatttgtacatcttttattgaagcgcagccttatagagcggaattaactcatctagcaccatttcagcctctttaataaagtctttagcaggggacagatgattatcgtcaggtagataaattttcccaactaaaaattccccttttttcacatcgcggaaacgttcaagcgttgcctctagttggccgtcatgcacaggatacgttttttcttccgtatgatctggggaaatagcaaagttgtccggtaaatcagccaataatttcttttctttcaaaaagcgattagcaattttcaaactttcttcattttcataaataaaagcgagccagatgaataaatacttatcaaacaatcctacttggaaatgaggatgctttttataaccacgtttatcatggcaaatggcgagccacgtgctatcaggtgggttaactgaacgtctttggtgacgagcaatatgtaaaaacatttcatcgccaagcttggcacttaaataagtagtcaattcttccccaacagctctgaattttggttgaatatcattttgaattccggtcatgcgtgcttcaagcccagaaatctgcattgttttaaaatctttcttactaaatcctttaaaagtcatctgttttcctcctaattttgcatatattttcattatacggaagttaagttccaagtgaaagaatcttgttctattcagataattcatttttgtgataaaataaacaaaaagagtgcgaagaggtgtgcatatggacagcgaaaaaatagattatttagcaaggttatggattatggaggccgcagcaaagattaagcaatctttcaaagaaacgttagacattgatgtcaaatccggtcgcaatgatttagtgacgaatatggataaagaaaccgaagctttttttgttcaacaaattaaagaccattttcctgaccattgtttatttggtgaagaaggaatggcgtcagatgtaacagatttagatggagtggtttggattcttgacccaattgacgggacattgaattttgttgaacagcaacgcgactttgcgatttcccttgcagtttatgaagatggaatagggcggcttgcttatatttatgacgttacacgcgatgagctgtattttggagaaaaaggaaaaggtgctacagtaaacggcagaactatccctaaacttgacccagcaatagacctaaaagatacgctattaattgctaatttgagcgtgacaagaaaattcccgaccatgtgggaagcggtaaaagtttctagaggattgcgattacacggagcagcttcactggaatatatggacgttgctactggacgagcgggagcctatctctctgctaatttagcaccgtgggatattgctgcgggaaaaattatcgtagaagaattaggcgggaaagtgacacggattaatggtgaaaaaatcaatatgttagaaaaaggaagttctattgtagcatcgccaaaaatccatcaaaccttattagataactacctgccttaaagaaagcgctcaacataaaaaaacttgttttcagaaaataaaaatcgtgccaaatcggctcagctatgctataataggtaagttgatttaaacgagacgatagcgacggaggaaaataaatctattttcctctttcttttggctaatcttcacgataaatgtttggatttttaatttaggaggaaacaagattgaatttaagaaatgatattcgtaatgtagcaattattgcccacgttgaccatggtaaaacaactctagtagaccaattattacgccagtcaggcacattccgcgacaatgaaacagttgcagaacgcgcaatggacaacaatgatttagaaagagaacgcggtattacaattttagcgaaaaatacagcgattaagtatgaagatacacgtgtaaacatcatggatacacctggacacgccgatttcggtggagaagtagaacgtatcatgaaaatggttgatggtgttcttttagtagtggacgcgtatgaaggtacgatgcctcaaacacgttttgtactaaaaaaagcactagaacaaaacctaactccaatcgtagtagtaaacaaaattgaccgtgactttgctcgcccagaagaagttgttgatgaagtattagaattattcatcgaactaggcgcaaacgacgatcaattagaattcccagttgtttatgcttctgcaatcaacggaacttcaagctatgattccgatccagcagaacaaaaagaaacaatgaaaccacttttagacacaattatcgaacatatcccggctccagttgataatagcgacgaaccattacaattccaagtatcattacttgattataatgactatgttggtcgtatcggtattggccgcgtattccgtggaacaatgcacgtgggacaaacagttgctttaattaaacttgatggcacagtaaaacaattccgtgtaacgaaaatgttcggtttcttcggactaaaacgtgacgaaattaaagaagcaaaagctggtgatttagtagcattagcaggtatggaagacatcttcgttggtgaaacagtaacaccatttgaccaccaagaagcacttccgttattacgtattgatgagccaaccttgcaaatgactttcgtaacaaataacagtcctttcgctggtcgtgaaggtaaacacgtaacaagccgtaaaattgaagaacgtttacttgcagagcttcaaacggacgtatctttacgcgtagagccaacagcttcccctgacgcttgggtagtttctggtcgtggtgagcttcatttatccattttgatcgaaacaatgcgtcgcgaaggttatgaattacaagtttctaaaccagaagtaatcatccgtgaaattgatggcgtgaaatgtgaaccagtagaagatgttcaaattgatactccagaagaattcatgggttccgttattgaatctatcagccaacgtaaaggcgaaatgaaaaacatgattaacgatggcaacggacaagttcgtttacaattcatggttccagctcgtggcttaatcggttatacaactgatttcctttcaatgactcgtggttatggtattatcaaccacacattcgatagctaccaaccaatccaaaaaggacgcgttggcggacgtagtcgtggtgttcttgtatccatggaaacaggtaaatctactacttacggaacaatgcaagtagaagaccgtggtactattttcatcgaacctggtacggatatttacgaaggtatgatcgttggggaaaacaatcgtgaaggcgatatcgctgtaaacattgtaaaagcaaaacaaatgactaacattcgttctgctaacaaagaccaaacaaacgtaatcaaaaaacctcgtcacttatcactagaagaatcattagaattcctaaacgaagatgagtactgtgaagtaactccagaatccatccgtttacgtaaaaaaattctaaacaaaaacgaacgtgaaaaagcagcaaaacgttcaaaaactgctgaataattaacgaacaaaagaccaaataatttttaagtatatcgcttaaaaattatttggtctttttatgcattattttatgtaaaaaagggaataaaaataatgaatttgtaacactattgtaatatgaagcgcaatttggtatattatatgtaagtagaaaaggtggttaggaatatgaaaaaatggatggttattatatcaatcattagtttagttgcactattaggtgcttgtggcaataatgataatgaaaaagatcaagaagataaatcaacaacagattcaacaactaaaaaagcaaaatcttcatcaaacgaatcaaataaagcggcggaaacaaaagaaaatgataccaatgataaagcagctaccactgataagggaagttcaaatcctactaaagaagaaaaagatacgtctacaacaacagatacaccaaaaaaagaaacaccaaaaagccccgcgaaaacagaagcattttctttttcaccttctggattcaaagtatctacagttgaatctattcttggtggagatgtaacaacgacgtatttatctagctctaaatcattccaaaaggattttgaagctttaacactttttatcaatcaatataaagtagaacatgtcattaatccaacaaaagaagtaagtgcgagtaacccagaaagttatttagcaaacaagaatggttatgttattacacttgatatctccattaaaaataattcgaaaaaagataagatgtataaagcagatcaaattagtttgcttggagcaagtaaatctgtcggcgggagtttagataactttatcccttctggttttcatcttataggaagttcatcggatccatataattttacagcaggtaaaactgctagagggcttttaactttcacgatggatgaagcaacttataatgatttagcaaaagattcgcaaataggcgtaccagatccaagtagatttgactctagtagcactaaaggaagtagtcaagataacgttgttgcaccgtttccaattaaataaaaaagtacgaagagatttgaaaatctcttcgtacttttttattctgatatggtttctttattatgttctaacatattttttaactcactattcgaaatcactactggtttatgaaaattgaaatggccagaattaacgcgactgatagtgttaatagctactcgatgttcacattcaggacatagatacattctaataggtttattacgtaattgttttgttttaaattcgcgattgtctagctcatctacacgttcgcataagatacattttgcgttcaatttgtcttcacctcacacaagtattatagcatgattattgaaaaaggcgagtaaaagtgaatttttcaaaaattttaattagatcgtgcttgcgtggcaaataaattatgctatactagtactatctagtattaacttttacttaaggtttttccttgagatgaaaataaagcgctatttttggcgtatgatagggggttctgtgatggcaaataaaaagatagatcacagagaagaggcagtggagcttttaaaacaagacgcaaaacgaatcttacagttgattaaagtccaaatggataatctaacattaccgcaatgtccagcatatgaggaagttcttgatacacaaatgtatggtttatcacgtgaaattaactttgcaacccgcctaggactaattgaaccagaagaaggcaagaaactaatgtctacactggaaaaagaattgtccactttacatgaactgtccatgagtaaaaaataatgaatcaaatgaaaagatgtctgattttttctggcatctttttttgtttggtagtgaaaaggctaaaaaatgagccaaaagaaggaggcgattcttcttttcatttggaggtcttttcctttataataggaagaatagaaaacaagatgggatagtaacttctcagggattggacgatgccgatgtttaaacgaattttaaaatcttatgattatgcatttattgcggtatttatcgtgctatgtttatttgggcttattatgatttatagtgccagctggtctttagcaattggcaaaggcttaccggcagattatttttatgctcgtcaagtaaagaactttataattagttttattttctttattctttttgctcttttgccatttaaattttatcaaaataataaggtgttaatgttaattgtatttgggtctatcggtgttttattactgattttcttagttggtaaaactgtaaataatgcgaatagttggctcgttttagggccacgctcacttcaaccaggcgaatttgctaaattagcagttattatttatatgtcggctatctatgcgaaaaaacaaagctatatcgatgatttcaaccgcggtgttttaccgcccatattctttttagcatttgtatgtttcttaattgccatccaaccagatactgggacagcttttattattttcttagttggttgttgtattatcatcacttctggaatgcgacttcgaacgattatgaaattaattgggattggtatgggtattattattggactcacgctcatcttattcgcactacctgatagtgtgaggaacgaaattgtttctccaacaaaagttgctcgtattacaacttttatgaatccttttgaatatgcggataaggaaggacaccagctaattaattccttctatgcaataggttcaggtggcgtttctgggcaagggcttggcgagagcgttcaaaaacttggttacttaccagaagcacataccgattttattattgccgttgttgcagaagaattaggtgtgtttggtgttatgtttattattttggcactattcttcattatctttaagactatcaccaccggactcagggcgaaggacccatttgcctcattaatgtgctatgggatcgctagtctgattgcaattcaagcatttattaatcttggcggagctagtgggctgattccgcttactggtgtaacactgccatttattagttatggtggctcttctttaatggtgctgtcgatgatgcttggtatcgtagcgaatatctcaatgtttactaaataccaacgtgtttataaagcagatggttccacgaaagagttaccaaagaaacaaaaaagacgttaaattatgtagaaaaagctaaataattagctttttctttttttacgataccgcatgtttttggcgttttatagccagtttattcgtgttttcgatattgttttaaatatttagaaagaaaataatttacatctgatggtatttaatactataattgaagttatataccgttttacagcctaaaaaaaggggattatcatataagtgtacataatcatttcaaccgttggaggctacgtataaagtatagaacagatcagtgttggttaggaggaaaaaaatgaatcgaattaaaaaagtattagtagcaaaccgcggagaaattgctatccgtgttatgcgtgcgtgtactgaactcaaaatcaaaacagtggctatttattcacaagaagatactggaagttttcaccggtataaatcagatgaagcttatctggttggagcagggaaaaagcctattgatgcgtatctagatatcgaaaacataatagagattgctaaagaatctggtgcagacgcgattcatccgggatatggtttcttgtccgaaaacattgaatttgctcgtcgttgtgagcaagaaggcattattttcgttggtcctaaatcaaaacacctagatatgtttggtgacaaaattaaagcaaaagaacaagccctattagctgatattccagtaattccgggaagtaatggacccgtggctggtattaaagaagtagaagaatttggtgagaaaaacggttatccattaatgattaaagcttcccttggaggcggcggtcgtggtatgcgtgtcgtagaatcaaaagaacatgtcaaagaaagctttgaacgcgcatcttcagaagcaaaagctgcattcggaaatgatgaagtatatgtagaaaaatgtgtgatgaatccaaaacatattgaagtacaaattcttggtgacacccatggcaacatcgttcatttattcgaacgtgattgttcaatacaacgacgtcatcaaaaagtagtagaagtagctccgtgtaatgcgattacttctgaactacgtaaccgaatctgtgatgctgcagtaaaactaatgaaaaatgttgattatattaatgctggaacggttgaatttttagttgaaggtgacgatttctactttatcgaagtaaatcctcgtgtccaagtggagcatacaattacagaaatgattactggtattgatatcgttcaatcacaattattcattgcagatggttatgcacttcacgaccaactagtagctattcctaagcaagaggatatccatattcacggttctgctattcaaagccgtattacaacggaagatccacttaataactttatgccagatactggtcgagtagatacgtatcgttccacaggtggttttggtgttcggttggatgctggtaacggcttccaaggaacagtagtaacaccattttatgattcattactagtaaaattatgtacttggggaatgacatttgagcaagcaacgcgcaaaatgcgtcgtaacctgatcgaattccgtatccgcggtgtcaaaacgaacattcctttcttattgaatgtagttcgtcatccagattttgcgagtggtaattacaatacaagctttatcgatacaactccggaactatttaaatttccacatattcgcgaccgtggtacgaaaacgttgcgttatattggtaatgtaactgttaatggtttcccaggaattaagcaccgtgataaacctgtttatgcagaaccacgtttgccaaaaattccttatggttcgcaaatctctccaggaacaaaacaaattttggatgcaaaaggtccagaaggcgttgtcgactgggtgaaaaaacaagaagaagtacttttgacagatactacgcttcgagatgcacatcaatctctacttgcgacacgtgttcgttcaaaagatatttttcaagtggcagacgcaatggcacatttattaccaaatatgttctcatttgaaatgtggggaggggcgacttttgacgtggcatatcgtttcctaaatgaagatccatgggtgcgcctagaaacacttagaaaacaaattccaaatgtgatgttccaaatgttacttcgcggagctaatgcagttgggtataaaaactaccctgacaatgttatccgtgaattcgttaagcaatcagcacaatccggtgtcgatgtattccgcgtgtttgacagcttaaactggatcaaaggcatggaagtgtccattgatgctgttcgtgaagcagggaaggtcgtagaggctgctatctgctatacaggagatatcgatgatgacacaagaacgaaatatacgattgattactataaagatatggcgaaagagctcgttgctcaaggtacgcatattttaggcattaaagatatggctggacttttaaaaccacaagcagcttaccgtttaattggtgaattaaaagatacagtagatgttccaatccaccttcatacacatgacacaagcggcaacggtatttatacttacgcagcagcagtcagtgcaggagttgacattgtggatgttgcatcaagcgcgatgagtggggctacaagccaaccaagtatgactggtctttactacggattagtgaatggtaaccgtcaaacgaacttagacgctcaaaattcccaaatcattaatcattactgggaagatgtccgtcactattataaagactttgacaatgcgcttaattcacctcaaacagaagtatacattcatgaaatgccaggtggtcaatatactaaccttcaacaacaagccattgcagttggactaggcgatcgttgggacgaagtgaaagaaatgtatacagtggttaatcaaatgtttggtgatatcgttaaagtaacaccttcttccaaagttgttggagacttggcgctattcatggttcaaaatgaattatccgaagaagatgtatatgaaaaaggcgataccattgatttcccagattccgttatcgaattctttatgggggaaattggtcaaccatacggcggcttcccagaaaaacttcaaaaactagtactcaaaggacgtacaccacttacagatcgtccaggcgctttaatggagccagttaactttgttgatgtcaaagcagaattaaaagaaaaaatgggttatgaaccaactgaaaaagatgtcatttcctatattttatatccaaaagtgttcctagattatcaagatatgattaacaaatatggtgatgtaacagtccttgatacaccgacattctataaaggaatgcgtttaggggaaacaatcgaagtagaacttgaaaaaggaaaaatccttttaatcaagctaaattccattggtgaaccaattgcggatggcacacgtgttatctattttgaattgaatggacaaccacgtgagattaacatccaagatatgaacgttcaatctactgttattgcacgccgtaagattgatacaactaaccctgaacatgttggagcgacaatgacaggttcagtcattcaagttgttgtgaaaaaaggcgactctgtgaaaaaaggagatccactactaatcacagaagcaatgaaaatggaaacaacgattcaagcgcctttcgatggagaagttagcagcatttatgtttctgacggcgatactatcgaatctggtgatctattaattgaagtaaacagaatttaaaaacataaatgactaacgggtgggaatatgacgctaatttaaagtgaagaactttaaaaatcgataagttaaacgtgttatatagacgtttttccagatttattagcgttagatttcccgcctgttttttctgaaaaaggagaacatacatatgaaatggtttaaaggaattgccgtagttttattgcttgctattttaactgcatgcgggaatacggaagtaaaagagacaacgaagcaaacagaagaaatcaaagtgaaagatgcaacgggtgaaacaattacactgaaaaaagctccaactaaaattgtttcattaattccaagtaatactgaaattttatttgcactaggacttggtgatgaagtaaaaggagtatcggcatatgatgattatccaaaagaagctcagaaaatagagaaagtgacttctacttcagttgatacagaaaaaattattgctcttaagcctgatttagttcttggacacgaatcgatgcttgcaacagaaaaagacgcttataaaatacttacagatgcgggaattaacgtgtttgtagttccagacgcaacaaacttaaaggaagtagaaaaatcgattgctaccattggtgatctaacaggaacggaaaaagaagctacaaaagtgaccgattcaatggagaaacaaaaagtagctattgaaaagaaagcgaaagaattaaaaacatcaccaaaagtatggattgaaattagtccagacttatacacagcaggaaaaggaacatttatgaatgaaatgctagagcttgctggaggaactaatatcgtaacagaatcaggtttcattccttacaatgaagaaaaagtagtagaactgcaaccggatatcattttatctgtctatcctgatgccaaatcaactatccaaaaacgtgcagcatggaaagatattccagcgataaaaaacgataaaatctatgaaatggatgccaataaattaagtcgtccaggaccaagattgcttgaaggagcagcagatattcaggctgttcttgaaaagaataactaatatttagagcataaaaagcagattccgctttacaaaaattcacttttaaggtaacttaacataggatggtttttgtctaaaaaagatatttttagcagaaatcaaaatataaactaactgtaacatgtattgaagaattaacaaaaacagcaagaaacactaacatagaaaactaaagacatcattatgtaatagttcctgtgtaaagtgaggtggctttgttaaacgttagattgaattttaagtatggcagataagtaacacattattatttgggaagaagtgtttttgtgaaacaaattatagaagtattaaaagaacaatttaaatatgcaccaatgatatttagaattgcccgttatgaagataaggcaacctatcaaagtcattacctaggattagcatggcaagtacttaacccgctaattcaaatcgcaatttattactttgtgtttggttttgcatttaattcatcatctggatctaatgcaagttacattgagtggatgctagctggtattattccttggttcttcattagtggagttattcttcaaggtgcaaatagtatatataataaaataaatatggtttcaaaaatgaattttcctatgagtatcttaccaagtattaatatagcttctaatttaacgagttattttacaatgatggtacttctagttgggttgtttgcggtaaaaggtacgccaattacaatatactggggacaatatttgtattatttcgtcgcgatgattgctttcttatatagttttactctattaaatgcaactataagtgttcttgtacgcgattactacatcatgctacagtcattaattcgtgttttattctacatgtcaggtgttgtttgggatttacaaactaagttacctgaatgggcatttaatattttgaaattaaatccgatttattatctaattaatggctttagagaaacgttcttgatggagaagatgttttgggaaaatccgtcttacacggtttatttttggctattaacaggcgttctattatttgtgggggcctctctgcatatgaaattccgtgaacgctttgtagattatttataggaggtatgacaatggataaaaatattaaagtttcatttaaacatgtgtccaaagaatatgacctctaccaaaataaatctgataaaataaaaggtttattcttgccaaaaagtaagagagtacagtctttttgggcgcttagaaatgtttgttttgatgtatatgatggagagacagttggattaattggtattaacggttcaggaaaatctactatttctaatatcatgtcaggtgttatcccaccaacgcaaggagaagtagtcattaacggcgaaacatctcttattgcgattgctgttggtttaaaaggcccattatcaggtttagaaaatattcgtctcaaattacttatgcatggcttaaaaggttcgcaaatagattccttattgccaagtattatagaatttgctgacataggtgattttatcaatcagccgataaaaaactattcaagtggtatgcgttcccgattgggttttgcaatttcagtgcatacagatccagatattttagttgttgatgaagccttatcagttggtgaccaaactttctatcaaaagtgtgtggataaaattaatgaatttaaagcacaaggaaaaacgatagtgtttgtcagtcactcgctaggacaagtgaaaagtttatgtgataaaataatttggatgcatcatggtgaagtcagagaaattggtgacgctgcagaagttgcagaaaaatatgatgaatttgttaaatggtttaataaacaaccaaatgactttaagaaaaaatatcaaaaagaacaaaaagaaaagcaaaaacttccacaagaaaagatttatccaacccctaatgctaataaatataaaatgggtctatttgataaatgttttttagttgttctgttagctttattagttctgtttggatcactgatatctacaggtaaatccttcatgggattatttagtgctactgacaacaaagtggaacaagtaacaaaagtagataaacgtaccgattggaaataacactaagctgtttgcttcttaatacaagatgcagacagcttttttggttgaaagtttttagaagtcatcttttagacaaatattgtgtgcttttttaagaataatattaataattcttcagatgtatgttagaattagtctatctgaaattgtgaaattaatttaggaggggaaaaatgattaaaaaagtttttcattttatacttgtactgatgttaagtgtaagtataatacctctattccatgctaaagcagctgaaacaactaatggagtagatagtagtgaacaggaagataataccgaagttgcgcgtgaagaaatgcctccagagtctgaggaaccagtattctcgcttgaacaaaatagagatgatgctatggctgctttagtcgtgcctcaaactagaaatagttttttgagagcagctagtactccgacatttcaacaaacatttataaattccatttccacgcaagcaatggatttatgtaaaaagtacaatttatatccatctgtaatgattgctcaagcggctcttgagagtaactggggaagaagtgaattagggaaggcccctaattacaacttgtttggaataaaaggatcatataatggcaaaagtgtaacaatgaaaacttgggaatatagtgattccaaaggttggtatcaaatcaacgcaaactttgccaaatacccatcacacaaagaatctttagaagacaatgcgaaaaaacttagaaatggcccaagttgggactctagttattacaaaggtgcatggcgcgagaatgcaaaaacatacaaagatgcgactgcatggttacagggacgttatgcaacggacaacacatatgcttctaagctaaatacgctaatttcttcatataatttgactcaatatgatactctgtacgatacgattaaacaacaaaaaaatgtttctgaagatgctaaagtagttaaagcagatgggcatggtgtttatagtggaatttacaatacgtctgcagccagtgcgaaaaagttatctactggagcgccttacaacaataaagatgtaaaaattttaaaagaaggcactacaagcagaggaacgtgggtccaattttctctcaataataaagtaatcggctggatggataaacgcgcatttgtctattatccaaaagcaacaaatgtaaaaacgcttaacctaacaggtaaaatcactgctggatctactaatggtttatggtctgaggttccaggtacagtgaatgcgaaaaaattagctacaacagctggtgcttaccaaaataaagatgctaaaattattaagcaaggtcaaattagtggccgaacttactatcaattccaagtaggcggtaaaacaattggttggttggacgctcgtgcatttcatgtttatgataaaatccaaagccagtcaaatgtaaattggaatcgaactattttaaatgccgataagcacggtgtgtactcgggtgtttataatacttcatcaagtagtatgaataaactaagtacaggcgcgaaatataataataaaaaagtaaaagttattaagcaagccaagaccgcgcgtggaacttggtatcaattccaagtaaatggcaaaacagttggttggatggattatcgtgcattctttgacacaattacctcccaaaaaacaatgaataaaacagttactgtgggtaatgccacgaatcatggcgtttttgatggggtttatcgaacctcgccaacggtaaaacgaatttctttggggaaaccatacaataataaaaaagtaaaagtgctcaaagaagctgtaacagaccatgccacatgggttcaatttaaatacggtaacacaactgcatggatggacaaaaaagcatttaaatattaaattataacacttccataatctaattttatggaagtgttttttgtaagtactttgataatcagtttttacgctaccagtgatggacttcgctcgctaaaaaaggtatactaattttcgtaggtaaagattatatgtacctttgaaatcaaattttcgttaaaagtataaaaaaatagaactactttaagattttatagtgaggaaggattgtatttatgagcaacagtaaatttattattacagaattatactgggaaagaattcaactacatgtaaagggtaaaatagaaaatatttcgttagagaactatacgttttcatttaggactttaacagatgaatttcatttttcaccaacgggaatcaaattggaaggaaacacatttgatcttcgtttcaatattgctattttaaatgatgggaattatttaccaagtggggattatctcttatccttatataacagtgaaacagcggatgaaattgttgcccaaccggctgctgaactatataaatttccagaagatgaagatcttttagaagaactaaacgaagctaaaaccgaaaacgaaaaaaacaatgtgcttttagcaggtttaagaaaagaatttaaacgcggtggggcgaatctcaagtatacgtataaagtcaccccaatgatttctgcagatgtaaatgaatttgttttctctgtttcatttacaatccctgtaccaaaaccaacaaagtggcaagtattcaaaaataaaattaaagaaatgtatcatactttcagttttaattttagaactggtttgtttaaatctattttctatacctcacaagccctagtacctaaaaacggaaaacgaattcttttttcttcagattcccgtgcagaaattggtggtaattttgagttcgttctaaataaaatgaaagagatgggtattgataaagattataaaatcaaaatgacctttaaacccaacattcgtttgagaagagcttttattgagaaatttagatttccatttttgctagggagttcagatattatttttattgatgattatcatccgatgatttatacaattgacttcagcgaaaaaacacaagtaattcaattatggcatgcatgtggggcttttaaaacagttggattcagtcgttcaggtaagcaaggcgggccgttctttgatgatagagcacatcgtaattatacacgtgctattgttgcttcagatacagacataccattttatgcagaagcttttgggataaaagaatcttctattttaccaactggtgtaccaagaacagatattttctttgatccagagtacaaaagaaatattgttactacgatggagcagttgttcccagaaactcaaggcaaacaagttattttatttgctccaactttccgtggaaatggtgcgaatcaagctcattacccatattttaaaattaatctggctaagtttgctgaatactgtcgaaaaaataattcggtcgtaatctttaaaatgcatccgtttattaaaaatgaatttattattccagaacaatatgcagatgttttcattgatgctagttcttatcgtgaagtaaatgatattctattcattacggatatattgattacggattattcatctgttattttcgaattctctaccttacaacgcaaaatgctgttctatgcatttgacttggaagattatgtttctacgcgtgacttttatgaagaatatgaaggttttgtgccagggaaaattgtatatgatttcgaagcattaattaaggcgcttgaaatgaatgattttgaacaagaaaaggtaaaaccatttttagataagcactttaaatatcaagatactaattctgcaaaacgaattgtggaagaaatctttaaaaaataaagaaagaggtaactgtttataacaaacagttacctctttctttatttaagttcatcgccgagacggataattaggtcgcggacatcgtctttaatttcgggatgttttagcgcaaattttaaagtagtttcaataaagccgaatttatcaccaacatcaaaacgttctccttcaaaatcataggcgaaaacaggttgaatttcatttaaacggttaattgcatcagttaattgaatttctccaccagaaccagcttcttgtgtttctagatacttaaaaatttctggagttaataaatatcttcctaaaatcgctaagttggaaggagcatcttctacattaggcttttcaacaaaaccagttacattatacaaacgatcacttacttctttgtcaggatcaataatgccgtaacgatatgtttcttcgcgaggaacattttgtacaccgataacagaactatgagtcttttcgtattgatcgattaattgtttagcacaaggggttttagattgaacgatgtcatccccaagcattactacaaatggttcgttaccaatgaaacctttagcttgtaaaattgcgtctccaagtcccttaggttttgactgacgaataaaatgtaagttaatattagtggtttcttccactaaatgtaataaatctaatttgtttttttcacgtaaattattttcaagttcaggtacagagtcgaaatggtcttctatggctctttttcctttccctgtaacaattagaatatcttcaattccagacgcaactgcttcttcaacgataaattgaatcgttggtttgtctacaattggaagtatttcttttggcatcgcttttgttgcaggaagaaatcttgtaccaagtcctgctgccgggatgactgcttttttaactttcatggttttcctccttgaaatcacattacattcattataagcaatttgatttatcaaaacaagcttagactatatttcatcaataagataacgtttgcatttgatacaaaagaactattagcggacaaaatattgcttttttaaattttttttaatatgattgaagatgacttagttttggagggagaaagttaatggaagatgttagaaaaaaatggaaaaaggtacagtgggataatgaaattacgtataaaacattccttacatatagtgttctctttgtcttagtaacaataagtatttacttacttttttggttaagaggttattcatttatttggtctcatgatggttttaaccaacactatccgattttaaaagaatttagaaatatgttagtagatttcctgaaacacccaactcaagtgccggaattatggtcttggcaaattggaatgggaggcgatgtggtcggtagttttggctactatgttctaggtgatatttttgcttatttagtagtactatttccagcagatcagatggaacttgcatacacaacattaattctattacgcttgttttgtgtaggtattgccttcttagctctagcgaaaaactttaaaattaatcatattgctgcagttacaggttcattagtctatgtgttctctggttatttatttgtttcggcaacaaggcatccattttttattacgccgatgattcttttaccgctactttgtctttgtgtagagagagtgcttcaaaagaaatcaccagttccgttaattcttgtgatttgttggacattagttagtaacttctattttgcatatatgcttgcgattatggtttgtatctatacagttattagatactttactcattacaaaaagcaaggaattccgctactaagtactattggaaaattagcggtctatgcaattactggctttttaatggcatgtattttatttttacctaatttaatcgcctttttaggttcttccagggcaaatggagagtttgcgaatgggctatggttctatgatttgtcctattacttatcgcttggaaaaatgtacattacaaccgaaagcgctggttattgggcaaacttaggtttcgcagcaattgctgtgtttgtacttccgtttatttggcagtatcgaaaaaaatatccggttgtatttattagtttggttttaggacttggcatgatgctatttccgtttttcggggcattatttaatggtttaagtagtccttccaatcgttggatgtttgcagttgctcttcctgtaagtattggagtttcctttttattaacagactataaaacattaacgaaaaaagatatgcgtaattttcttattacacttattatctttatcgttgtttcatggtggggaccgaacttcaatatttatcaacctatcttgttagttcctttaacattaatgcttttaaccttttttgttttctttttacaatttattaatttgaattatattaagaagaaagcttataatggcttgttttactttttgattataatgttagtatgtgtcaatttagcttatatgggtaattatatgtttagtaaaaacggggctaataaagtacaaggtcaattaaattctggggttgttgaacgtaaaataactgaactatatgggggagcagataaaaagattgataagagctctttctatcgtaccagcctttctagtgggtataatggattttatgataattcagatgcaaacattttgttagatgtaaatacggtgaattcattttattcgattactaatggtgcagtagctgacttagcttctgaattaaataatagtcagtttcgcatgacgttgccgcttgggcaaatggataataggactatttttacgaatatacttggaacgacttacttatttgcacgtgatgatcaagctggcagaataccatatggctttaaaaaaattgattctgctgaaattgaacgagtagataaaccaggcattagccatacagatgtatatgaatctgaaaatagtgttccattgatgtatatgaactaccatacggaagatagagaatcatatgaaaagctctctccgcttgaaaaagaggaagcactttcttataatgctatcattgataataaagacacatccaaacgtgagtataaatcgaatattaaagaacttgaatttgaaacgagtatacctaaagttaatggcaaagctcctgcaaaattaacgaaagacaaaatagaggtttctaatgctgaaaatagcattcaatttaaattgaaaaacccggaagaaacaaaaaatgcagaactttacttttatattgatggtttagatttcacgccatacactttcaaacaaagaaaagatattgcgtttgctaaagatgagtataaaacaaaaaatatgcgttataattattaccggaacaaccttaccaaacgtataaaagaagactatacattaacagccaaaacatctaaccgtgtagtttcagcgagccaagtggataaaagtgagctttctgggtattttaaacgggacaacatgcttttaaatggtggtttttctgaaaaagctcggaaacaagtatctattaatttgagcggtcttggtacgtacgactatgataatatcaaaatttacgcggttccatttgatgattcttatacgaaaagaatgcaagaactaaaaaaacaagctgcaacagacttgaaatttgatacaaacaaagtgtcggctaaggtttcagcaaaacaagatggtgtgttagttacaacaattccatatacaaaaggttggaaagtaaaagtagatggaaaagaagtatcaacagaaaaagtcaatacaggatttattggtttttccttagataaaggactccatacaatcgaaatgaattatgaaacgccaatgcttaaagctggcatggtggcgagtggcttaggtgtcatcctttttgctggaattatcgtggtgtatcatcttagaaagcgcaaaaataaaacacaataaatgagggaaaacgttaggtagctatgttacatagccctaacgttttttgttagttctgagattaagcaaaagtgtaaattccgattatagtatgatataatttaactgttaatctattttaggaggatataatgagaaatttaaaagatagagtactcaattcattaaaaggtaataaaaaagatattaaaattagtgttgttgtacctacatataatacagaattagaaggtcttaaaaacttaatggcgtcaattgataagcaaacaatgaatccagatgagtatgagcttgtttttgtagatgatggatctacaacagatacatacgaacgtttgcaagagtttgctgaaacacgtccaaatatgaccgttaaacaaattgaaaactctggttggggaagcagaccaagaaatattgcaactaaaatggctaaaggagaatatatcctttatttagaccatgatgacacagttttccctgaaacatttgaacgcgtatataatttcggaaaagaaaacaatttagatgtagtgagcgggaaagaagtaagaacaaatggttggtcatggggatggaagcaattctctgagaacaatccgcatgcagaagaaatgggtattgaatgtttacttccaatgactccacacaaattttataaaagagaattcttgttagagaatgatattacatttgatgatggagctcgagttctttgggaagatgtatattttaactctaaggcgttcattcacggtgcaaaagttggtattttagccgattatcctacgtactattggattgcaactggtgcaaataattccagtagtttcggacgtgatccgcatgaaaaatggaaccaaattaataaattatttaatttctttaaagacaatatcaaagagcaacgtgacttagattttatgctaactcattggtatcgctcacgagttcttgggattttagggcaatggctactaaaaaacaacaatgaacgtattgatattgaatttaactatgcaaaaaaacttgccgaagaattaataccagcctatattagcgaaaacttagataaaaacaatcaagtaaaagattatttattaagacaaggtgatttagattcattaaaaaaacttgctcaaatcgatgctggaattacagcgcttagctatgtggaagatgcttactttaaagaagacaaactattcttcaaaacaagtacaaaaatgacatatgaagacaaagaagatttctttattgaaaaaacagcagatcgaatggaacgtattttaccagaagaaatcaaatcgaaattgccaaaagaattctttgattatagtgatgatttagctgaatttacgtatgagccaagtattaaaggacgtaattcaagagctacctggaaaatcgacggttctactagtaatgtagaagttgttaataaaaaagcaaatttgtataaaatagaaggtgaaatgtctttttctgttcaaattaatgattatatattagatgcagctgataaaaaacaaccatgggatattgccacacgctttaccggccttgggtatacaagtcaccgagcattaaccattggtaaaattcttatcaaaacagcgttaataaataacaaaacaatgattgtttataaaaatgcatctggtttaataagtctggatgttggaagtagcgttcgttcaatcgtggaagattctggtgtgaaacgtgaacaaattcttattgataaaacatctggaaaagtaactattccattaaatgaaattcatgtgtttggtgaaagccttattgaaggtaatgcagaattaaaaccggtgggaattagtgatgcggatccaattaatgtaaaagctaaattgattggtgaagctaataaagcaagagtagaagttcttttgggtgatgaaaaactatctggtgaatatcatttagtaactaatatccaaggtaaaaaagataaacagcaaattaaaataacgctttaagaatggagagaaaagaatgaaaggtataattttagcaggaggaagtggaactagactttatccacttacaaaagcaatttcgaaacaaatgttaccaatttatgataagccgatgatttattatccgctatcgatcctaatgttagcaggtattaaagatattttaattatttcaaccccagaagatactccacgctttgagcaattattagctgatagcgatcaactgggtattaatatttcttatgcggttcaagaaaaaccggaaggattagcacaagcgtttattattgctgaagattttattggggatgattcggtttcgcttatacttggagataatatttattacggacaaggtttatccaaaatgcttcaaagagcatctgctaaaaaagctggagctactgtatttggctaccacgtgaatgatcctgaaagatttggagttgtggagtttgatgaatcaatgaaagctatttccattgaagaaaagcctactgaaccaaaaagtaattatgcggtaactggtctttatttctacgataatcgcgtagtggaaattgcgaaaagcattaaaccatctgaacgtggtgagttagaaatcactgatgttaataagcgttaccttgaactgggagaactagatgtagaacttatgggcagaggatttgcttggttagatacaggaacacatgaatctcttcttgaagcgtctacctttattgaaacaattgaaagaagacaaaacttgaaaatcgcttgtcttgaggaaattgcttatcgaatggggtatattgatgaggctgcagttgaaaaattggcagaaccacttaagaaaaatgcgtatgggcaatatttaatgaaattaattaataaataagaagagtgaggcgtactaatggaaattgttgaaagtaaactagctggtgttaaattagtaaaaccaaaagtgtttggagatcatcgtggttttttcatggaaagctataatgaaaaagcattccatgaagctggaatcgatatgaagtttattcaagataaccactctctttctgtggaagcgggtgtacttcggggtatgcattatcaaacgaacccaaaagcacagacaaaattaattcgtgttgcgacaggcgcaatttatgatgtagttgttgatatgcgtaaaggttctcctacatacggtgagtgggaaggttatattttaagcgaagcaaacaaacatcaacttctagtaccacaaggatttgctcatggcttttgtacgattaccgaaaatgtgaatgtgctttataaagtagatcaattatattcccctgaaaacgatgcgggaattgcctacgatgatccggatttaaatattacttggccaacagataaattaattttatcggacaaggatacgaaacatccacgtttaaaagacgctgaaaataattttgtatgggagaataaataaatgaatttattagtaacaggtggggcaggttttattggcagtaatttcgtacatcatattttaaataagcatgatgattataaagtcgtaaacttagatttgctgacttatgcaggcacaatgagcaatttagaggatatcaaagaaaatcctaatcatgttttcgtagaaggaaatatttgtgattatgatctagtgaaaaaactagtaacagatcataaaattgatactattgttaacttcgcagcagaatctcatgtagaccgtagtattatcaatccaggtatctttatcgaaacaaatgtacaaggaacgctaaatcttttaaatgttgcgaaagaattaaatgtcgcaaaatatctacaagtatctactgatgaagtgtatggttcacttggagaaactggatatttcactgaagaaactccaattgctccaaatagtccatactctgcaagtaaagcttcagcagacttattagttcgttcatattttgaaacatacggcttaaatgtaaatattactcgttgttctaataattatggaccacatcatttcccagaaaaattaatcccgctaatgatcacaaatggtcttgacggggaaaatttacctatttatggtgatggtaaaaatattcgcgattggttacatgtgtcagatcactgtgcagcaattgatttagtaatccataatggtaaatctggtgaagtttataacgttggtggacataatgaacgtacgaataatgaaatcgtgcatatcattgttgacgatttgaatctttctaaagataaaattgtatatgtagaagatcgtcttggtcatgatttacgttatgctattgaccctaagaaaatcgaaacagagcttggttgggaaccaaaatatacatttgatacaggaattaaagaaactatcgaatggtatgtaaataatgaagcttggtggagaccactaaaatcacgcgcaaagttgggtgaataaatatgagtattttagtaacaggagcaaatgggcagctcggaacggagctagttcaattattaaaagaacataatttaaccgtgactgagtgggacaaagattctgtagatattgtggataaagcagctgtaaaaaaagcaatgcttgatttaaagcctgaatggattatccattgtgccgcttttactaatgtagaagcagcagaagatgaattaaaaaacgttaactgggaagtaaacgtggatgggactgaaaatatcagtgaagctgcagaaatagttggagctaaacttgtatatatcagtacagattatgttttcgatggtactaaaaaagaagcatatttaccagatgataaaacaaatccacttaatcaatatggaattgctaaattagcaggagaaaaagttgctttagaaaaaaatagccaaacttatgttattcgtacttcatgggtgtttggtaaatatggtaataattttgtatacagtatgcttaaactagctgaaacgcataaagaactaaaagtagtaaatgatcaattaggtcgcccaacatacacatatgatttagctgacttcattcgttttgttattgagaagaatccggcatatggtatttaccaattctctaatagtggaactgcgacatggtttgagtttgcaacagaaattttgaaagataaagatgttactgtgaatccatgtacttcagatgaatttccacaaaaagctgaacgtccaaaaacatctattatgagtttggaaaaagtagagaaactaggttttaacattccaacttggcaagatgctttagttcgttttaaaaaataataaaaaaaacaattatacgatgcattcgtataattgtttttttatatctttatggggtttatttgtttataatagtaatgtgtataaattactctatgaacaaaaggagccggatattttgaacgattcaagggacttacattccatttgttttgtttctacagaagtggaagataagaacaataacgtacattttatagcagaatctgcagatttattggcagattgcttagtgctattagagaaagagaataaacactatttaacttttatgaaagaaaatttgaatacaattgcgttagccgagaaaatcgaatatgcaccagatatcatttgcccaaataaagttttgaaaggtagtttgtatacaaatcctgaatgcatagataacagccttgctggtagtactttctccaaagatttacttaagagagtagcaaatgaaatgaagcaagaagtatttgaattaacaagctttaattattattgttatcatttggcggagaagattggtcatttgggagaagaagctagctattcgctctctttggcggacttagatgactcggttacacgtttacttgatattaaagataatcattaccgaaaagattggacaattttatattatgtaaataagtttttaatgatgcatttagaaaatttaccgaaaatttttgaagaatcagatgaaaaatttcaaattaattatttagaaaaacttactgaacttattgcgaaactgccggatgaggttatttttgagttagatgcgctcgattatttggttcaaaatatattaaatgattcatttgaatggattaaatacgaagcatatccagcttgtttaactttagctgaaataataagtcaccgagcagcaccaaataaattcacggatactaaatggctgtgtttagaaaaatgtgtccgaaaaggttctgtaaatccgctaagaaacaaaaaaaatccaactgttttgacaccaataaaaaagaaatttgtttctttttttagccgtaaagtggtgtttacaattgcaaaactgttacctgttgcgaaagataatgttttgttagtttcgaataaaattagtgatttagatgctactttcatgccgatttaccagacaattaagcaaaagcatcctgaaaagtctgtgcgtgcgtacatgaaaatgcgaccagaagataatcatgcaatgtattatttaacatatttttggaatcttggaagagcaaagtatgtgtttttagatgactattattatcaattgtattctattagaatgaggaaagaagcggaagttattcagctttggcatgcagcaggagcgtttaaacgattcggtcatagttctctaggatttaaagactccatatcgcttgattttgaaacaagagcgcaccaaaattacacaacgagtgtcatatcatccagtgatttaaaaccgatttatgcagaagccttccatatggatgaaaccaaaattgaagcatttggtctaccacgtttatggaagttatttgatcaagactacaaggaattcagactagattatttccaaaaaatgtacccgcttcttaaagggaaaaaagtgattacttatgcaccaacttttcgagggaattcagaagagcgaaaagcattccaactcgaattaaatttacgtaaaatgaaagaggaactaggacaagaatatgtagtagtaattaaactgcatccattagtaagcgttgaaacgcaagttccagaagatttagctgattttgtacttgattttagtggaattgaaatgaatgacgttctaatcgtaacagatattctaataactgattattcgtctgttatttatgattactctatcttgaatagacccattattttctacgcatatgatcttgaagcctattcattagaacgtaatttttatcatgattatttggaatttgttccaggtccagtggttgctacaactgaagaagcaattaaacttattcaaacaaatcaaatgataacagggaagttacaggactttgcagagaaagcatttgaatatcatgatggtgatgccgcagctcgaattattgattatgtaatgcaagattgatgtctgtacaaaagatattgagtttatggtacaataaagctatgtttattagtaaaatgttaaaggagactaaaaatgatttatgcagagatattagctggcggtaaaggtacgcgcatgggaaatgtcaatatgccgaagcagtacttgccattaaaaggaaaaccaattattgttcatacaattgagaaattcattttaaatgaccgttttgaaaaaattattattgcaacacctaaagattggattaatcacacacaagatattattaaaaaatatatatttgattcgcgtgtaattgttattgaaggcggaacagatcgaaatgaaacaattatgaacggtatccgttatgtagaaaaagaattcggcttaaatgaagatgatattattgtaacgcatgatgccgttagaccatttatcacacatcgtattattgaagaaaatattgatatggcattagaatttggctctgtagataccgttatccctgcagttgatactattgtagaatctactaaccatgactttatcacagatattccagttcgtggcaatatctatcaaggtcaaacgccacaaagctttaacatgaaaacgattcaaaaacattataataatttaacagatgatgaaaaacaaatcttaacagatgcttgtaaaatttgtttgcttgccggtgaaaaagttaaacttgtaaacggtggaatttcaaacataaaaattaccactccatatgatttaaaagtggcaaatgcgattgtacaggagaggattaactcatgattaaccaagtatatcgcctagtttctgagagacaatttgaagaagcgaatattgaagaagcacttactgaagatgttgttgtagtaagacctacatatctttctatctgtgctgcagatcagcgttattatacaggttctcgcggaaaagaaatgctttccaaaaaattaccaatggcgctaatccatgaaggtgttggccaagttacgtatgacgcaactggcgagtttgaaatcggaacaaaagtagtgatgattccaaatacaccgacagaagatgatccagttattgccgaaaactatcgtcgctcttcgctatttcgttctagtggctatgacggcttaatgcaagagaatgttttcatgagaagagatcgcgttgttcgtttaccagaaaatatggacatggaagttgcggcttattctgagttaatttctgtagcgtttcatgcaattacaagatttaaacaaaaagcaaatgctaatcaatctgtatttggtgtatggggcgatggtaatttaggctttatcacttgtctattgctaaaaactatctaccctgaaagtaaagtgattatttttggtaaaacacaatataaacttgatttcttttcttttgtagatgaagctcatttagttgatgaaattccagaaggtctagtgattgataatgcgtttgaatgcgctggtggcaaaggaagtcagtacgcagttgaacaaattattgatttaattaaaccagaaggaacgatttctttattgggcgtttctgagaaccccattgaatttaattcacgtatggtattagaaaaaggattgacggtattcggtagtagccgtagtgggaaagaagatttccaaaacaccgtaaattttcttagtgaaaatgaacgtgctgtagaatacttatctagtctaataggccaacgtaaagtagttcgtaatttacaagatattattgaagcttttgagacggacttacgtaatccatttggcaaaactgtcatggaatggaaagtataatataaagtatgaaagaaatctcaggtcaaatattatgtcgaaaagcataatgggtctgagattttctttttaataaagaaagtagagatgatagtgaaaaatatagcgatttctatgtacatgtttctgttaagtctattttctttttttagtcgattttttggcgtgaaaaaacgagtattgattatggcctcattcccagaaaatacaacagcgattttgaatcaaatgaaaaaaatgggctatactccgaacacaatttgttttcatacagagagagttcaattcaatactaaagaacttgattttgttcgtttttcacctaataatttggcgaataaatggaaattaatgttttacttaaatacatcaaaagtgattttagtcgataactattaccctgaactagcagcggtttcttttaaagatggtgtcgaatgtattcaattatggcatgcaaatggagctttaaaacaatttggatgggaagataattcgatttcagaacgttcagatgcggacaaaaaaagatttaaagcagtatatgaacattttctaaaagtagtagttggttcagacgagatgggcgaaatttttaaaagaagcttcttattaaatgaatctcatttattaaaaatcggtgtacctcgaacggatgtttattttgaagaaagcctacaacagcaaaaaagaatagaatggcgtaataaatttcacgctgaaaataaaaaagtgattttatatgcaccaacatttagagataatgagcttgcggaagccaagttagtaatggattttaacgcaatggaacgagctttttcagaggattacttactggttttaaaattgcaccctgcagttaaaatagatgtacaaagtctaaatacagattttattattaatgtagataaaaatgttgcacttgaagaacttttagcggctgttgatatacttattactgattattcctccattccatttgaatttgctctttttgaaagaccgatatacttttttagttatgacatggagaaatatgataaagagcgcggcttaataaaaaattatcaagaaattatcccaggaccgatctcccaaacaacggcagagcttattgagcaaataaaaacgaaggccacaagcgagactttagcacttttttcgaaaaaatggaataaatattcggatggtcatgcaagtgaacgcatggttgtttatatgaaacaattaatggaggaggctaagtaaatgaaaaaggttattacatatggaacatttgacttgcttcattgggggcatattcacttattaaagcgcgctaaggctcttggtgattatttaatagtagcaatttcttccgatgaatttaatcgaattaaacataaagaagcttatcatagttacgaacaccgtaaattaattattgaagcaatacgttatgtggatgaggtgatcccagagaataactgggaacaaaaaagagatgatatagagaaatacggaattgatgtttttgtaatgggtgatgactgggaaggcgaatttgattttctaaaagatgtgtgtgaagttgtttatcttcctcgaacagaagggatttctacgtctcaaataaaagatgaactaaaataaaaatgtgagaggagcattcttttggaacctttagtaagtgtaattattccagtttataatgtagaaaagtatgttaaacgatgcttggattcagttcttgagcaaacatatcataacctcgaagttatcgtagttaatgatggagcgactgataattcagctaaagtcataaaaagtatctcagataatcgaattcgttattttgaaaaagaaaatggcggacaagctactgcccgaaattttggattagatgtggctacgggagattacatcgtgatggtagatagtgatgattacattagcaaaaacctagtagaaacttgtttggatactgtacaaaaaacgaatgctgatttagtcttgtttacttcatataatgtgaatcaggaaggaaaaatgcagtatataaagcgtgataaaggcatcaaagttttagatgcaggtccaactccatggaacaaattttatcaagcagatctatggaagggttcgcgttttccagtaggttattggtatgaagatctaggaattattccagtcgtcacgctaaaagcaaaaaatccagtgaaaatccaggacgcactttattactacataactgatagagcggattcacaatcgaatattcaacaagtagatcactttttagatgtggttattatgttggaaaatgttgaaacagaattaaaaaaactaggtatttacgaagaatcaaaagatcaacttgcgtacctatatatagaacatctaatttatcgtttagttttacgaaaagcgatttacattacgaataagcaagaacgaaaaaaacttattaagaaaattagtacaattattcaagagaagttccctaattggggtagttatccttatcaagcgggtggcaaactaactgcaacattaaagaaaaaagcattatggctttatttacatcatttgtacttgttgggtgatttagtatggaaatatccattttctatcagaagtaagcaaacagggttttaaaggaggttatcattttgcataaattaagtgtggtcattgccgtatacaatgtttctgagtatatagaagcatgcttaacatcagtcttagaacaaaactacaagaatgtggaattaattattgtcaatgatggttcaactgatgatacctttcaaaaagtagaaaaactagtagacggacatacgaatgttattttgattgatcaagaaaaccaaggtgtttctgctgtccgaaataatggtgtaaaagccgctacaggtgattatctaggctttgtcgatggagacgatatcattgctaaagatatgtttcaaaaaatgatggattcttttgaaatgtcggatgcagatatggtaacaattggtgtggcaagactttcaggagataaagtatacccttctacattacacgaaagatatatggtagaaaaaaaagaagccacaacaattgaagaaacaccggcacttttatatgatactacttcgtggaataaagtatttaaaaaatctttttgggataaacaccatttggaatttccagagggccaaatgtatgaagatatcgcattaatgattccagcctttttgtatgcagaaaaggtaaatattattcctgatgttggctattattggcgcagtcgcgagggtggagcaaaatcaatcactcaaagacgaaatgacattgccatggtgaatgatcgtttacttgctttgaaaaaagtaaatcaagtacttaatgagaaaaatattcagggtgatttaagatatcaaaatgaacgtaaaaactttgaaattgatttgttttccatgattgaatgggcatttttagcgccgaaggattactatttggctcttcaaccacttatcaaaaattatgttgagcaagaaatgaaaacaactgctttgaatgatattccaaaagaaaagaaacgacttttcaaagctttgttagcaaataatcgtccggcttttctcctaaatagttacatttattttggtaagaaagctgtgaaaaaaataacgaaataagagacaaaggacaaaatacttcggatctttagtacacttgtaaacaattgattcaagtgtgccattgcatcattagaagtactatgtcttaggctctttttttgttagtaacagttaatttaatagtgaatctaccttttatatgctatgataattggtatataataagtcaaattaatgcttataaaaaatgataggagcagaagaaatgacaaatttatttcaagatgatagtctaacgctgcatacagacttatatcaactaaatatgatgaaagcgtattttgacgatggacttcatgagcgtagatcggtgtttgaagtgtttttccgagatatgccatttgattcgggttttgttgtgtttgcggggctagaacgaattattcattatatgcaaaatttacgttttacagaaacggatattgcttatttacacgacgaacttggttttgatggaccttttctagaatatttacgtaactttaaatttaaaggaaatattcttgctgcgaaagaaggggagtttgtttttaaaacagagccaatccttcaagtagaagcaagtctagcggaagcacaattaatcgaaacagctttgcttaatattgtgaatttccaaacgctgattgcaacaaaagcggcgcgaatccgttctgttattgacgacgaaacgtttgcagaatttggtacaagacgtgcacaagaaatggatgcggctatttggggcacacgagcggcttatattggtggttgtgattcgacgagtaatgttcgcgctggaaagattttcggtattcctgtgtctggtacgatggcacatgcgatggttcaagcttaccgcgacgaactagaagcatttagaagttacgcaaaaacgcattttgattcaattttcttagtagatacatacgatacgctaaaatctggcgtaccaaatgcgattaaagtggcgaaagaaatgggcgataaaattaactttatcggcatccgcctagatagtggcgatatggctttcttatctaaaaaagcacgccaaatgttagacgaagctggctttacagaagcaaaaatctttgcttcgagtgacttagacgaacatactattttatcgttaaaagcgcaaaaagcaaaaatcgattcttggggcgttggcacaaaactaatcaccgcttacgaccaaccagcattaggtgccgtttacaaaatggcggcgattgctgatgaaaatgatattttacaggattcgattaaactttcaagtaacaccgaaaaagtgtcgacacctggtaaaaagaaagtttaccggattattacgaatgaagatggcttgaaagcggaaggcgattatattgctttggcggatgaatcacttgagaatgtcgacaaactaacgatgttccacccagttcatacgtatattatgaagacagtcgagaatttcaccgcgcgtgagctacttgtaccgattttccaaaatggggaacttgtgtatgatatgccttcactcgatgaaattaaagcatataaagaagagaacttggcgctactttgggacgagtacaaacgaacagttcgtccggagcaatacccagttgatttaagtgtaaaatgttggaaaaataagatgcgtaatatcgaaaaagtacgtaaaagtgtccaacttcattcaccagttgaactagatatgccgttttaggaggaattataatggaaatcagagaaagaattttagcagatatgcaagtggcagaaacgattgatgcacacgaagaaatccgaaaaagtgtcgagtttttaaaagcatatttaaaaaagaatacgttcttaaaaagctttgttcttgggatttctgggggacaagattcgactttaacaggaaaactagcacagatggcgataagcgaaatgcgagcagaaacgggcgacgatgagtaccgattcttcgctgtgagcttgccatacggaacgcaactagatgaatcggaccgtcaagatgcactgaactttatggaaccagataatcgtttaaccgtaaatattaaagcctcagtggatgcgagtgttgcggcgcttgcggaagcgggagtggaactatctgatttcgctaaaggtaatgaaaaagcgcgcgaacggatgaaagtgcaatacgcaattgcagcgatgcataaaggcgtagtggttggaactgatcactccgcggaagcagttactggcttttatacgaaatacggcgatggtggaacagatattaatccactgttccgcttgaataaaagacaaggcaaggcgcttcttaaagagctaggctgcccagaacatctatatttgaaaaaaccgacagcagatttagaagataataaaccggcacttcctgatgaggtcgcgcttggtgtgacttatgaccaaattgacgattacttggaaggcaaagaagtcccagcagatgctgcggcaaaaattgagaattggtttattaaaaccgaacataaacgccatatggcaattaccatatttgatgatttctggaaataggaggttgtttaaatgaaagttggttacgggttattaactgcattttatacacatccaggagagcgagatcatttagtgaagattttgcttgaagcagcagaaagtttggaagagtataatacgtgcatccagtatatcgtcagcgaatccgaaaacgaagcagatacggtctttgtttctgaaatttgggtcgacaaagggcaccacgaagcttctcttgataaccctgctgtaaaagcgacgattgaacgtgccaaaccattaataaaagaagtaaaacgaatacaagaattagacatactcggcggaaaaggcgtataagcttaacaacaagaatgattctgggactttcctggaatcatttttttggagggatgacaaatgcaaacgttgatgattgtttgtgctggtggtgcgacttccagcttaatggcacaaaacgtagtgaaaagtgctacgtcagaaggaatggacgcggttttactatttcctgatgatgtgaaatataaagatagttttcgcgaaaaatatagcacgcgggatttagttgtcgtcatgggaccggtcggcgcgattacggccggtaagtttcgcgattacaaagaacaagtcgatgcagttttagtagcaccgcaagtaaaatatatgtataaaacagtagaagaagtgctaggcgaactgaatattccttgcgccaatattaattcactcgatttcggtcggatgcgcggcgacaagattcttacgcaaggtctagccttgatgaacgcgaaaaattccaaataaggtgttgcaactttagaggggaaacgttaaaatgaaagaagatgaaaaggacaagtgatttgtccttttcttatattattgtgaagtaaccgcgattttgcggtttcattttatagataagggtggttttgtttaaaattatgaaagactttaccgagcaagagaaaattatcgttctagattttggtagtcagtacaatcaactaattacgcgccgcattcgtgaattcggtgtgtacagtgaattacatccgcatactattacagttgaagaaatgaaagcactaaatccaacggggattattttttcaggaggacctaacagtgtgtatgacgaagatgccttccgcgctgacgaaagaatctttgacatgggaattccgattttgggaatttgttacggcatgcaattaatgacaacgcacttcggtggcaaagtagaacgtgcgaaagaccgcgaatacgggaaagcggacattcacgttgagaagccaaaccgtttatttgctggactaccaaccgatcaagttgtttggatgagtcacggcgatttagtcgttgaggagcctgctggttttgaagtaacagttactagtaaatcttgcccaattgcaggtattgcggacgaagaacgttcactttacggcgtgcaattccacccagaagtacgtcactccgtttatggcaacgaattactgaagaattttgcattaaatgtttgtggctgtaaaggcgactggacaatggaaaactttagtgaagtagaaatcgcaaaaatccaagaaatcgtaggcgacaaaaaagtcttgcttgccctttctggcggtgtagattcctctgttgttggcgtgttaattcataaagcaataggcgaccaactaacatgtattttcgttgaccacggccttcttcgtaaaggggaagctgaccaagtaatggagacattacaaggcgaattcaacatgaacatcatcaaagtagatgcgaaaaaacgcttcatggacaaacttgctggcgtttctgacccagaacaaaaacgtaaaatcatcggcaacgaattcatttacgtatttgacgatgaagccaacaaattagatggcgtagaattccttgcacaaggaacactctacacagacatcatcgaaagtggtacagcaactgcccaaacaatcaagtctcaccacaacgtaggcggcttaccagaagatatgcaatttaaactaatcgaaccattaaatacacttttcaaagatgaagttcgcgcactaggaaccgaacttggcatgcctgacgcaatcgtttggcgccaaccattcccaggcccaggcttaggaatccgtgtgcttggcgaaattacggaagagaaattagagattgttcgtgattctgattacatcttgcgtgaagaaatcaaaaacgcaggtctagaacgcgaaatctggcaatactttactgctcttccaaatatccgtagcgttggtgttatgggtgatggtagaacgtatgaccatactgtggttgttcgtgcagtgacgagtattgatggtatgacagccgattgggcacgtattccgtgggatgtactggagaaaatttcggtacggattgtgaatgaagtggatcatgtgaatcgtgttgtttatgatattacgagtaagccaccagctacggttgagtgggaatagtaaacggagagctagaaagcctttattgataagggttttcagctctttttttattttcattgcacttttattgcactatttggttgcttgttttgtcgatagttcactgtgaactgattttttggtgacgaatcaagattttgctcagcgggttgaaaggaaataattccatttaatttactggcaacttcaaaattactatttggatacaagtgtccataagtgcctagtgtagtttcgatatcttcatgtcctaggcgctctttaataattagaggattttcacccatactaatcaataaagaagcatgagagtgacgtaaggcatgtatcttaatacggtgaatgccagccattttggaaaatcggtcaattgcatgagcaatcgtatgtttttgagttggaataccattgtagctcattacaaaatttgtctttactacattttgttgaacttctctccaatcagcaagataactcaaagtaactttatcaagaacaatgtgacgaacacttgcttttgtctttggctctacaaatttatagtcaatctgacttttataatataaggtttttgtaatagatactactccagtttcaaaatcaatatcttcccattgaatagctgtagcttcaccgattctcatgcctgtcataaacaagaaccataatgagataaaaagaaaattttgatagtaatcctccttatatattaaggaaagtactttctcaaattcttcttttgtccagaactccaccttaggtttcactttctttacgttcccaataatctttgatgggtttgtagtagtaatacctaaaacgattgctctatccattgcaacagagaatagaccttgtacagctctcacataagatggcttgagattctttgtcattttaagttgccaatcttggacattgattggctcaatatcagataccgccattttataaaaatatggaaagtgcttctgaatagtagggattcgattctcatatgttcttagcttaacttgtgttttataccaaggaaggaaaatttcattgatataatactcaaacatcattttatctttattctcgtttaaatcatctgggttcattagcaataggcgagaatattcttctctggcttccttttttgttttgaagccactacggtacttttgaatctttttgccttttacgtcatagcctaaattggcacggaaatagtacgttccattttttgcttttttaatttggtcattagtcatagtttttactccttcttgtgcaaaaactaatcagacctgttttcatttgaaaacttgatacctagaagttcttcaacagcttcacgaggtactctatccaattttcttgattgataataggtgtgtcctcttgatatcatcagctcttttgctttcttgataatatcagctgaaaatgaatttccatatcctagcttaattaagtcttgtttagtgactgttaccattaaaactcctttccattataggctaggaaaactccaatattcacctataattataacaaataaaagcacatttttaaatccgcttacatatatattttttgctttttataacatacaagaacagttgtaggacaacttcactggaattccaccaccctcattcctatgagagacgcttatttataagtagtgcgtgtgtatcattatctcaatatataattcatcgctccctagattcctacatcaaggtttgcagtccaaaaatgtatcgctctttctttttataaaagaagtcatggcgtattggctacacagctagttatatactgaatgtattcaagcatgtaatatttaattgtcaaagaacaatcggcattgatttgcctatcaaagatcacaaagacttgtgggctttgatagacaaactaattaagattctccatgtaccaaaattaattgacacatggaaaaattgagactaagataattcaaacttcaaaacagcagtgattaactttgtttctaacattcgctttatttcttcctctacatgaatataggcattgccatattcatcaaatagtgttttttgagaaagacgaatgatataatgctcgaagtgtttcaatatttgattgattgcatttacatcaccatttacagcttgaagaattactacaaatggtaatacctctttagttgatttcatttcaatgttcctccatgagtttttttaactcttttaatgcatttgttttgtgataatgtacggtgctttccgctaaatccattaaggtagcaatatctgcatttgtcatactaaggaagaatgaaagaagaattatatcctgttttctttttgttagtttaccgattgcttgagctatcaatacatcttcaattcgtatgtcatagtcataagaagccattatgatatagtttgaatcgtaatcatcaaaaatacttagttgacttagttcagccattgataatgcttcaagagatatcagacgttcattgcgtcgtttgttctcatcgtagatatctctagcgaaattacgtacaactgttttacagaaactatcaaattgatgttcaatagttttttcatagttagaagttgttgtcataagagttcaccccctttccatttgcaagtaattaattaaccttgcttactcctatcacggtggagagggggtgaatcttcgataaaaacaaaaaaatacacacttttacctcatggcaaaaatgcgtattctttctatatccatatttaattgttagttttctttttttatcccctaaccaaaacataacagcacctctgtaaaagctaccgctgttttggaaaaattaacaaattaagaaaaacagattacaatagaaacttcatgaaaagctacttacaaagcggtagttttttttattaccttgtaagtttcattagtcattgtaatctgtaaataatttttagtatgttattattttttcactttcattaatcttaatccatttaatgtaactagtaatgtggcacccatatcagctacaatcgcaatccataatgttaaccagcctggaagcactaatagtaatgctagtaatttaattccaagggagaaagttatattttgcttgattatttttaatgtttttcgactaagatttacaatgaatggtaatttctttaagtcatctcccattaaggcaacatcagctgtttctaaagcagtatcagtcccagctcctcccattgctattcctacagttgaagcagctaaggcaggggcatcatttactccatctccaatcatagcgactttgccgtatgtttgtttcaattctttgatgtaagtaagtttatcttctggcattaattctgcttttatatcagaaacgccgatttccttacctataaactgtgctgtgtcattattatctcctgttaacataatagtgtgagcaatccctaatttatgaagttgtgcaataacttctttactagattccctaacttcatcagccacagctatgattgctaaaatatttgattctgttccaaacagcatagctgtttttccttgtttttgtaatgattggtaagtttgagatatactttgagatttttctaaactagattcaaaaagttttgagctaccaatgtaataggttataccgtttacctcacctttaacacctttaccagtgattgatgaaaaattatcaatttctattgatttgtaatcgacattatcaatcatagcttttgaaatgattgctgaggcaagagggtgttgtgacatggtttccaaagcagtaataatagaaagtgaattctgttcgtccatatgttcagaataaggaataaaatcagttacaactggttttcctttcgtcaatgtacctgtcttatcaaaagcaattgcttgtagtccaccaatttcttctaagtaaattccaccttttacaagaacaccgttttttgctgaattaccaattgcagaaacgatagatactggagtggaaattactaatgaacaaggacaacctacaactagaagagataacccttgatatacccatgtgtcccaatcaccaccaaagaatagtggtggaacgactacaacaagcaaagcaataagcataatagtaggtgtataatacttcgcaaacttatctacaaacgcttgtgctggtgctcgttcaccttgtgcttcttcaactaaatgtataatctttgaaattgtagtatcttctacatgtttcgtaacctttacttctaatagtccttcttcgtttaatgtcccagcaaaaacttcatcatcaactttcttttcaactggaatagattctccagtgattgcggactgattaattgctgaataaccttttataacaactccatccatggcaatcttttgcccgggttttataatcatgatatctccaatttgaatatcactaactgcaatcatttgttcaacatcatcacgacgtattaacgcctcttttggagcgatgtccattaatgaacgaatagattgtcttgctttatccatagaatatcgttctaacacttcactaaaagcaaaaagtattactacaatagaaccctcagcccattcacctatgatggacgcaccgataattgctatagtcataagtgattccattgtaaagtctaatttaattaaattagcgaatccctctttaaataaattaaatccaccaaccacaattgcaataacatacaagatgatagttgtcgttgaatcttcaccactaatattctgagaaataaaggctagtataataaaaataattgagacaactaaatgccaatttttcttaagaaaggattctttcttagcaggtttacttgaataatctttttcatcagtgactcttagattttcaaatgctcctgctttttcaatttgactgatggaagtttctccataaactgaaatctttcctgctccaaaattaacctttgcatcagttacaccctcaaggtttttaacatttttttcaaactttcctgcacaattcgtacaagacataccgtctacacggtatgttgtttgtttactcgctttactcataaaattcctcctttttcaaacattcaagtgtttgtttgaatatttacaaatacataatatcagattatataaaaacattcaagcgtttgtttgaataaaatcaatttcatcaaaattgttcttgtcttaaggtaagtaaatgttataatagcaattaaaaaaggagacgttaaatgaagaaaacaacgtatatactaaaagaaatttgcttatggaatgaatatttaaacttaaaaccaaattataatcttctaaatgatagaaaaattgtattctcaaaatgcatttctccaagtgagttgatatgaaaaataagacaattatatcaaagcaaaatttagttctaatagttataatggtaggtgctacccttacagaccagttatcaaaaatttggataacttcaaatttgcaattaggagaatcaattgaaattatcccttcttttttcaagataacatacgctcaaaatacaggtgcagcatggagcattttagaagggcagatgactttcttttatgtgataacattagttgcattgatactattaggatggtatttttatcgtcttaaagactatcaaattattcaaaaaattggagtagcgttaatggtttctggaacattaggtaattttatagatcgactactttttcaatatgtccgtgactctttagactttcatattttaggttacaattttcctatctttaatgttgctgatgttttacttatttgtggggttttattcatcattatcgatgaagttttaaaatcttttggtgttagttacaaaaaaatgtagccttttttcaagtagaagatttattttttaaaatagtataacaaaacctctctttatttttttaagctacaactaataatactagcttgtttaaaagataaagagaggttttaattgtgtttgaagatttttttaaagtacaatatctttgattaatgtttcaactaaagaattatttaatgaataatagaccatttttcctatttttttattttgaactactccagctttacttagtatcttaagatggtgtgaagtagtcgctactgttgatttcacaatgattgaaatatcacagacacataattccttttccaaagttaatgcataggcaatagttaacctagtttcttcagatagggctttaaaaatttggctaatatcgctaatttttttatcttctaatgatgtttgaattttttgaaccttttcctcatcaaaacaggttatttcacaaatgtcattcacgttcctaaacactccttttcaaaatacattcaagcatacgtttgaatataatctaatgataccacgcttttgctgtttgttcaattttttttgtttttattaactattatgcgagcaaaagaagaaagctaattgttttttatgattatccaattctcatttttttgtaagattatcttaaattgagaaagctgtgtaacttttgtttctttatcaaggtatttcactgttacaatggctgtaacttgattgtctgcttgtgtgtaaacagggtttacaagttccacaaatacataatctttattaattacatcaagagcttgattacttacatagtaagatagctctttttctgttgcagtaggatagagtttgaagaacgtatctaggaaactattgatttcctctgtcgtatttgcgtccacagttccgtcactatcggaaagtacaggctcatagcttgccttttgtggtttgctgtcaatggtagggttcttaatgattaccatattactagcttcatcaacatagacagtaacagaataagtggaagtgatattcttcttattctcactttctgtaatctgttgtcctactgaaaagagtacatcatattcagtatcgctactttgttctacactccatacttgaaaactgttaacgatagaactagtagggatatctgaacgaaccatttcagtatttagctgttgtaagttttcggtcagataattctttaagcgttcaattcgattgctctgtgaatcttgcgactgttgccatgaaaaatattccttgctaaaggattctacaaagctctcaatactgttggtatcaacaacctgtttctcaatgatttctttttcatggacggtgtgcatatcaatggctgtaaagtttttataaataccaaagctcatacttcctattagtaatacccataaggcaattgtgagctttttatgtgttcccactttgatagtgggaatctttttttgcttctttggtttgtctggtttttcttttcgttcaattttgattttcattttattaattcctttctatttgataatgcgtccagctccaattaaatgagcttgccaataactgtcggtaaggttggtataaccaataggatcacctgcgtggtacatttggttattaccaacatagattccaacgtgcgtcacgtaactaccagcgtcataggtagagtggaagaaaactaaatcgcctgctttggcttctgataaggggatatgctgtgttgcgtcatattgagcttgtgcaactctaggaagttgaatccctgcaactgcatagctccattgtgtcaatccgctacaatcaaaagaagtagagggagaagaaccaccaaacacataagggtagccctcatatttcagtgcttcattcataatcgcttgcacggtttcatcatcaaactggactggtgtaaggtattgagaaacaagcaatacataaaactgatttccatagttgtaccgccaaccaccatttacaggaattgcaatagggttaggatagtcaactttcacaccacctgctttatcctttgaaaaagattctgcaagttcatagctgtacttttttccattactagctacatagttgataaagccaccaccataattgtaggattgaatgactgtgttaatatcacaaccgttgctttcagcactagctaatagctcactaaagtatttacaaccctgtttgatggattcttctgtactaaggctgttcggtggaagtcctaaagattccgaggattgcataacatcttcggcagttccgccagattccacctgcataattgctagaatgtaattcacgtattcttcaatgccaaactccttacaatacttctcaaccattggtctatgtgccagtacctctgctgatacatttagaccaccttgttgaatcatttcttctctgctactacgtgtatcatcttcctctgcaaaaacgatagttacaaatagcaacagactaaagaacatagagaaaaccactccaaagatggcgaagtattttactagcttcattacttacgccttttcgtagtggtttttgttattttattttcagttttactattttttgaggtagtagaagtgttctctcgtttgttggctttcacttgctctttggttgtattcttttgtttctgcaaaggtcgttcatgttgctgattcgtagaagctgttctttctggtgtcgcctttggcgtactagcttgtggtgctggtgtcggagcagtacgaggtactggttgtttgcgttcctcataatcacgttgtcgtttttgcatagaagcataaggttctaagttggatttttcagcttttgccttatccatttcttgacgtctttgtgcgacagtcgctttcttttcattccgctttgtagcacgttcttgttgttgcagatttcttgtgtcagcaaatgattgagagaattcacttacattccgcacaaggtcacgcttgcctttatgaacagcatatttcgcattggttggagcatttttgatagtgtctttcatatccccagctttatcaaccattcgatttttggcttccatcaagtcgcccattttttcacctgctcgtgttccagcagaacgattctgtttcgtagaagtgggacggttggctgttgattcattcccattctcattttgtcgttcatggttagctttcgttgtcttagtaggagtaggagcttctttctctttaccagagcgactatttttaccaattgctcggctaacatttctctgtaatcgccttgattgacgatttaaaaacattctaggcttacggaacatttgtcgtcccatgctttgagaatcgttactctgtaaggagaacatattcatgatatcccctagtttgaagtagattccagcaaacgttactatctgtaagaacataatcatgaagaatggagaagagccagcaagagaatacagcatagtagagatactaaaggctactgtgataactaaagttagaccagcccttgtcataataacgttgaacagtttcataattgcctttttacccatgccatcaaaactaggtatcatacttaataagaaactgataggtagaaacatggcaaagataataaagagtacctgtgaaaatatcatcattccagtaagtaaaaagacaaagacggatataccaatgttaaagataaataagaagaataccgttcctaatctggaaactgttttactaatggaaaggttggcattgttaaatgtttcaatttcagtaatcacaatatcttctctatcttctccgttgttggtgtctgggcttgtagatagcaaactctctacacgatcagcaccaagtgaatcaacgtcagtcgtgccgtactggagcaatagccacggttgttttacctgtacagaaaataagctatcacgaatcatatcaacgctatctttacctttgctgtctgtatctggcataacgatttttgttcctacatcaagagctgatgtactaatatcttttgaaaagtcattgatgttgccgatatagtctggagcataagcaatgaatgaagcagatagaatgaatacaactataaagttgagaactgctcgtaccgctttggtggtttctcgtttgattagtcctgtataagtcacatagattcccaagataaagataagaataagcaagaatcccacgtaaaagccagaagtagagaaaccattttttgtgacacctgcaatggtctgaatgttttttcctatggaatccactgtcttactgatgaagtctaagctatatgcttcctgtaccagatagcctgtagcgttagataggtagagcgagattgtccatacaaaattggtaatggcatataaaccataactcacggactttccgataccgtccgaccagttccaaggcaaccagccccaatcattatttacatagaagtcaagttgatagttgccaagcccatacttagaatactcattgctggtgttgatagtttcatcaactagaccagctgcatgagcaaccgttccaacacttgctaacatgataatgagtatcacaaagaaaataatcgctatcagtacatagcgaatgatttttttatagatgggtagctgtttgattcgttgtttcttttctattttccttgcttttcgttcttccttagtccgcattattccacctcatttctaataggtgggcgagtatcaaaggcttgtaagagttcttcaaaaatagggtggaattgcattactcccacacgaccgtaaaggtcagagattaaacactgtccgttttccaattctcgtagtcgtttctgattgttttcatcttctgggtcaactccaaagaatgtcagggtctttttgatttccacaaggtcagtggaacgaaacgcaaactttagaccgatattgttcttcattttttcgtctaaaaggtcatctgcattttgcgtaacaaagtaaacaccagcgttcatggcacgcccagctctaactagtttcatagataacgtcttaccttgtgccacctgtaagaaagaccatgcttcgtcaaggtcaactatcttaaagatagagcggtctgtgtggataaagtctaatgcaaaggtactaatgacaatcagcatggcaacactcaataattccatagtagtgtattcttcaaagctagtgtcagcgtctggcaatacgaggtcagcaacttgaataatgttcagctgtttttctaagctgatagactgtgttacatttccatcactaaaaagtaagtgtgcaaaatcatagtcaacaaaactttcgatatggtcggctatgctgttactgatagaagtatcttcttttcgtaattcatcaataacaagtaataaccctcgctgttcactttgggttacattacgaatcgcttttctaagcactggaaacttatcactgtcacgactggagataccagtaaggaacgttagaatatcaatagctaaactttcagaatcctttttacggctcaaaatgacataagggtcaagcagtcctttgttttcatcatcactcgttaagttgacaatgtttatctcgtgggcgatttctggtagtgtttctttccatttgccacgttctgctttagggtcaacgataaccgcttgtccaccaaatagtaccgcataataaacaagcatattgttactgaatgatttaccaccacccaatgaaccaataaatgcactggctaacgcattggtaactgaacctttgacaccttgactagcaagggcaggtttcagatagacattctttccagtgtccagattgtacccaacataaataccctcatgttcgccaagggtttgtgtcgctccaaaaccaagtccagccaaaaaatctgatgtgacgtattgaatatagtcattgatgtaccgtttactggcagggataaattcgccatgtagccctaacatatctccaaagggacgcacgagtttgattgataagtcgtcgtaaaagtctttgacttcatcacaacgccttttcaactcgtcgagatcctttgcagatacacgaacaacatagctaagtttatacatggattctttactttggtcgagtgtcgtttctaattcattcacggaatccaaagcgtcaattacattattgcttgtttcgttgtcgctttcccaagcatgagaatctaaatcttttaattctttctttttgtttctcacggttgtaagagcttttttgttggctacaatttctacattcatgctggtatcaataggaaaggtaaattgttgctgttgataatagaagatttcagaactaggaaaatcaagttcgcctacaattgagttaatcgtgaagtaggcaacataagtggtttcatcttcatgaatgatttttaagtaacgctggctttcatcaattagacaacgagtaggtttgaggatatcatatttctttactagaacttctttatcctggtatttcttaggtaaatgatattcgtattcttcgtaaggtgtaccagtttgtccgtagatatgttcaatgatataaccaaaatcatttttatctagcttacggattttgaaccgtctggagattttactttccaatagattttccatttttgagaatcggtcaatctctgcattactcatagacacaaagtcgcccatgagcttatggttcacaccatttagaaattcctgcacagctttcttgatttcttgactaaccgattgaatggaaagttcttgttcattcagcagtaacttgaatccaataaaaaagcgatagtctacttgattgtcgccaatcatagaaactaacgcttcggtttgttcatcaatttttctgtgagcgacttcttttagtcgtcctttcacttccagctttgagcgttcctgtgtcgctctaatactggattctgtcgcaagctgtaacgcatgaatctttccatcacggctttgagctacaagctggcggaagttatcatgcacttgatacttttcatctggacttagaaagctgtaattgtaaggtatcagttcataataagcgaaacattcgccatcattgttaaagaccagattattttcaatatatttaattggatatgccataatacagttcactccttacggttgttattgcttcattgaattgttgcttttgaagtttcacggcttttcctgcataggtagtttttgcccgtataaaatacgtgaggatagactttaaaaatccatagggtttcttgccgtcaaacgtcttttggctcataaaccaagccaagcctactggaatcccaatatactttagcaacgccccatcaataagcgataaaggcggtaggctaccaaacataacgataacaagtagtgaaacaatgaaccatgtcatttgcgtaaaagttatgggaaatggtagttgtaaatcattgatggcgtagattactttttctacgttccaaatgctggtgtagcttcttatttttttcatattatcacgtcctttctttgtgattgtccgtccactacgattaagaaacaatcaaggcaggtagcattttcttgcgaaaatctccaccttttaatgccttgacaatttctttttttgccatgcttttttcgtgccgaaaacggaaaacaaataataagtttacttgtgtttcgtttcgttagctcattttatggcaaaaaccatcttcgttagatggtggaagtagctagttttcttttcgcaaggcgttgccctgcacccagcctcttcaaaaaacaaatattaattgcaatactcaaataccccatgtgaggttacaaggaaattgccgttaatttctaaatctctaccaatggcttgatagttaagatacatttgtagacgctctggaatttctcccatcaaaccatcttctacatagtaataagcgatatcttccatagaatcacaatcgctgtagcagatgatatcgtccttgctttctagcaattcctctaggctactaaaccacataccttgtatgtcttttagctcgtcatagataggcgaaccgtccagctccataatcatttcacatagacgattaatttcactaatcggtgtatattcgtcaatatcgaatggcaattcatagtcgtggatagcgtattcttcatactcgccattcaagccgattttttcttccatttcttcatagtcgataggtggggtaaaccatgcaccgacaagttcgccctcgttgtacttcccaaggttggcaacatagattctcatttcttccatgcgaccaccccctaagctccaatgattcgattgaataggttcagcagtacgtctttcacgccccctgcattgaataccagtcctacggcaatcagtgcgataatcaagaatccgattagttttgaaaactctcgtttgaaccccaaatatagtccaatgactacgattgccagtaagacaagggattgtgcgttactcaaaaaccagttgtataagttttgtccaaaattcatgtgttgtttctcctttcactcatgtatttcttgcggttaataaaatacctctcaacacgttctatcagttgagagggtctaagatgttccccataaactgttaccttgttaggataatgaggataaaatgtttgcttgtaaaagtcatattgatatggttcatcaactcctttccgaaacccctcaataatgagagaggtatatatgcctgtatcttgaatgtagatttctaactcaatcccgcagttgaaaccaagctcatagagttcagccgttaagccactcatacaatcacatcttcaactgctagattctgttgctctatcagcttttcgtgtttctctgtaagattggcgtcacgtatcatagctggtatgatgtctgtttcattaagcacatctaagatactggctacctttaaggtaggggctacttgatggcgtaaccagttgagtgtccgctcatagctgtatggttctggttttgttgtcaaacgtagctcgccacgattcttaccaatgaaccattcccagcgttcacttgtttgccattggctacgccgttttgtggtatccttatccgcaaaacgaatataacgattaatgatttcaaaagctgttttttcagcatttctataagctaacaagtcttgaatggcatgagtagctctgtcatttttcaaacgaatctcaaagcgatttttgacctctgggtcctctaagggaatatcattcttaataaattgctcgtaatctttctcgtagatacaaaagtacacttcgcttttgagtgaaccaatatacaaggtgtttcccatatcagatttttcatctctatggacgagttcgccacttcggtaattcttaaaggtacgaaagatagaaatacattcttcctgttctgatttacgagccaactctggaatatccaagataccgaccttgtcattgatagctaaatccaagcgtttgaatacgccgttgacttccaaacaatccgtaaagaagtcataccagcttcggtgttgagccagtaggaagttttcatattgccgacagccttttcctttcagctccagcaaaacgccttttgtaatatcataagaaaccattaccataatgtcgccaaagcggtaatgctctggataagagtagtagccaaaatcttcatgaatcatatagtctatattgaggtgcaatatttcttctatgattttttctacgttatccgtagggaaacgaatccgcacatagtcgaataacatttctagcggattgtctggattgaagcgttcaagtgaatcaagcaaagccgttttgacttgctctgttggaatgactttttcattctcaatgtctgataggtactgtctggtaataccagaagcaaccgccagcttattttgagaaagtccatatgccatacgcttttcttttagttcttcaatccaagaggttttattgttcaatcacattcctccaatcaaaaaagcagatgttgtcaacttttaatgtcgagtttacatctgcttcaaattgcgaaacaccgcatagttacggaagtttcttattcttttttgttgttttctagtgtttttgtgcccccctgttaggtatagggggctagacgtttggcgtggctgacgccacaccaatacgctagtctgaacctgtggctttcacttcgtccgccactggatcagccagcgacttattggcaagtttacctatttgttttaggaagtcatatccttttggcactttgggtgtataaaactcacttatgacacttgtaccagtgtctacatagccacgccctttgatgggcttcaagaaaaattgtttttgcgtatcatttccaaacatcatgccatatcctaattcactcaaacgacctagagccacacggaaattgaattggtcacggattccgtcgcctaaatattttgcatctggacgttggcaagctaagattaaaaagaatccagcttgacgaccaagcataacaatttgtttcagcttgcttatgacttcggcactatctctgcctagcatatccatgaacgctacatattcgtcaaagattaaaaaatttgcaggtagtccaagataggcgtagttttctcctgtcttatagtttgggtgttgcttcatggcttcacttcgtgcaatcatatcctcataaaattgattaatacattgaagcatatcgtctttacgaaagtagacgttgtccatgacagttgctaagtctgcaaggtcagagtttttagggtctagtatatataagttcgcattggtgtgaagcaaggcttcaatgatggtaagaatgaagtaactcttaccaccaccagtaccaccagcaatcaacatatgagggagtttgtcatattcccaataaacagaatccatgagctttaagcgtccatcatgagccgttgcttcatcaatctggatacgactagcgatagtatcatatagtaaggtgtactcaatgtaggaatcctttaattccttatctacaagctcacaatacaacccagtttctagcttattttcaagctgtaaaagctggtcttgatactttcccatagtgatttcaacattgatgtgaataagtccatctttgagatagtagtacatcttaggaaagtgactgattcgctcttttgtctttgagctgggtaggtctttaaagaatccctctgattgaatctgttcagcttcataccagccattttgtagaaccatctttgcgagcttttgtctgtgttcaagctgtttgatgttatcaatcttataatagtaataaagaaatcctacaataagacatacaaaaagggcagtgattacactacccaagaagtatggtgtttgtagttgtttaataaaatcatcaagtgttacagtttcccaatccaccgccatgatagcttttaagtgaaacggtatcatgacaagagagaataaggtaaccattgaaacggtaaagaagttagacagtaagtgtttgtcactttgctttatcttttttccacgatactgaaatagttttctcataggctaactatttcttatcgtgattttgtttctggtcggcttgctggttttgtgctggtcttttcaagacgatatcttcggctttgatataccagtctacatctgcaccttgaaatgtagcagtagctaccgtatcagcaatagggttaatgatttcaacttcggcgttgtagtcaaagttttttactccagcagaagcaggaatacttacttgtatcatacgtccttgttctttacattttaggtcaaaagttcgttccttgacctgttcggttacattaccctcatcatcaacaatcttgacctctctacgcagagcggaaaacttcaacgttccaaaagttttttctttttcaattacgattccttcggctaatctcatatttatttacctgtcctttcttataccttgacgatatcgtccgcatacataacataatttgtgaatccacgagtaccaatcttatagccctctgctgtgatacgtgggtttactaattttactttttgctcgatttcaaaatgtttttctccagcttcggcagggagaatgacgacaatatcatctgctctttgaatgtttgaataaaggttatagctacgagagagaatggtaggtttaccattaattcttcgttgttcaactttaccctctcctgcaaattctaattgtccaaatgttttttccatgttgggtattacgtgttttaattccatatattttacctcgttctttcttgaatatttatttaaaattaaatgtaattagttttattgttaaggctgcttacgttggggaacgtatagagtgcatagtatcctttccatagaaaaacgcaaggtacgtcaatgtcttgtcgtgatccttgcgtctaactttctattattcaatttttgcttttttacggcggaagtatagaactcctaatgtactaacagataacaacatacctaatgcaaagatagtaatatttgtggtatctccagtttgtggcaatgaagtaatcttttctgggattttattatttgtcatttcgcatttcacaacctctccattttcagtgatttcaaatagcataggggtatcatcaagctggtaaccagttggagcgtcatattcttgaaaatagtattttcctgctggtagcttttcaaaagtatagatacctttatcatcagtgcgaccctcagcaatagtatttttttcttcatctaagattctaatacctgtgtttggtaacaattcgcctgtagatacatctttctttgttaattctgctgtacctttcttaaggtcgttttcaatttctagtagaattgtaggttcttcatctgtagaactggtttctccaagcagtttatcatcttcatcaaaggctttgattccatcttttgttgattcaatacgaatgactttttcggacataagataatgagtagacgaagcggacttttcttttaaatagaatgttccaactggaatgtttttaaagtttccttgtccgtctttatcaatcgttacttcttgaatgacttcgttatcttcgttttctaatgtgaaaatagcacctgtaccaagtccatcataattaaactcaacaccagattctttatcgaagatagcttgttcattcaatttcttgataataaactcattaaaatgtaatttatttattataggagtacgtgcaattttaagcatagtctcgttgccaacagctactgtatcttggtagatataaatagggtaggtagcgttgttattttctgctgtaaacttaaaatcgtattctgtatcgtttaaaacgtgagaagttcctgcttcaagttcttttagataatattttccttgtggtaatttcaattcaaaagaagcaacaccatcacttacagtttgatatcctaacagcgcgtttgctggtacgtgtacttcatctgttaaggcttgcgcttcacgagtgaacacaccgaatactttttcttgtccttggataacttcaatttctggttgattgttattccatgaaaggatagattcttcatctttaaataatcgtaggtctaatgtttgaaactcgtttgtcgctttgattgctgtagaagctaattcaacttcttgacctgcataagttaaagagaacggaatagggcgtgtatctaagatatatcctgctggtgctgatacctcaacagcttgatattctccaagatataagttaggagagtgccattgtcctttttcatcagttgttacagtagcgacagtatcgccttttttagcttttaatgttccatcaactgaatgaatatcttgtgtcgcttcaatacgataggtaacgcctgctactacatttgcgttgtacttgaatgtatgaacatctccatattcggattctgtgacttcgatttctttagcctcttctccagctttcgtaagggtagcgatacctagctgttctttattatcaaaagtaagctcaattgttttgtttggttcaattgttacaacttgcgatacacctttatttacataaccattaggagctttcacttctgtgatagtaatttttgttccctctggaatatctttaattaaagcaataccgtttgaatccgtaactaactctgtagatgtaccgttatactcaaacttcattgtagtatctggtaatggtctaccagtttcttcatcaactttagtaatttgaacattacctaacttgataacatcaactttcactgtggcttgctttgcactttctaagtgaaactcaacaagtgtttgatgttgtggctttgtatagacaatagatgttccaacttcattttgtggtactttacgataagtaatagaaccatcatttgagttagcatttggcgtaattgtgatgttgtttccatcttgttgtaaagtggcgttagtattgtttgattctaagctcattccactaaggacaccgtgtgaatctgccaaagtgatactttctccaactgttacttttacttcttgattatgccaagaaggtaaggtatcatggcgatttaccatagccatgatttcagctttacgttgttggtaatttggaatagttgacgatacatattggtcgcctaattcttcccaaatcatgacttgagttacaacataatcataatgagattgacctgtattcgtatatccgtaataagctatttttgataagatatcttttttaggggaaatatacgattcaggaatataaccaccacctgtcgtagtgaatattccagattctacacagaatactttcttaccgtccatcttcataacgtagattggattgtgagtgatagcatatcctaaatgtggacttactcctgtatagctgtaagctgtaggttcattcaacacaagatcacttgcgtgaacagatgttgaagaagtaaaaaacgttccacagatggttactaaaaccataatataggtcgtcatttttcttaatagactttttgattttgttttcataatgtttcctttcaatttgatttttggtataataaaagacgttcagataagaacgtcttaatgcaataatatttagtttgatttctattttgaatattgaaattggaatcaagaatcaaacaaataacaagtttactgattaggtgcaaattgcactttgattgcactttttattttatttgatatggattataagacttaatagtctttcaaatccctttattttactgcatttttagttatatcccatacgtttaaaacagagtgggaatagaaagctaacataataagaataggaatatcaataaatcaacgtttttcaacttatgaaatgcttgattttcattaaaaatgatatatttccctaccacaaatccctgtcaagatgatgcttgacagggatttgttttttgtgggcttacattttaatactaaattgtaatataatttatttattaatatgatttttagaaaaaactgttctaaaaaggagggggaacgatgaaaacgaagatgccggaaatgctttctttcatttcagaagaagctgttagtagaaaaatgacaagtgaggaaattgctgctcactttggttatgataaacatcactttagtcgaaaatttaaagaaattaatggattcagtgtggttgaatttctttctagtttaaaagtggaaaaggcgattattgaacttgatgaagaagtacgcatactcgacttacaagaacattcaggttttgaaagtagtggtagtttcacaaatacgtttaaaaaatatacaggtagttctcctagaaaatacaaaaccgaaatgaatgatattttttatgatatgaaacgttttgaaaatgataataaggataagtcaatagcgcattttcaagaaaataatgattctttttgcaatgtaactattgatgtacctgatgaatttgagaagggtatcatatttattggacttttccgtactcttataccgaatcatatgcctatatcgggattagctactaaaaatttaataggaaatcaattgaaaaatattccaagcggagactattatttattagcttgtgcgataagccagtctaataacattctatcttattttaacttaagtaatagtttgagagggaaagaagatgaaaagctatcttttcctaaatgttctggcaatcattacgcgattaagctgagaaaaccaataccagaagatccaccaatattagctaatgtgggaaaaattttaatctcctgtttgaagaacacaatctagaacaattttgtttaactttgaaatgttaaaataattgtaggctaatgaaaaggagagataaggtatggctttaaatgcaaagagtatcactataggactaccagtaagtgatttggagaaatctgctagttggtatgaaaaactatttatgagtgatgaaaaattaacaccagttgaaggggttattgaatatcaaattggttcagtttggattcaactttttgaagaaaaaataaatgtttcagaaaacgttttacgcttaggggtagaggatttagatgtggaatttgaacgtttaaaaacacttggagtaataactgacgaggtgatagaagatgtacctggtattattcgatattttgtcttctctgatccagatggtaataagttgtcattctattggttgtatgaagaggaatagatttaaataatattatatgatgaacgataacgctaaaacgacggatgaatgattcgtcgttttttgatgttagaaataatgcttaagtggggtaagatataacattgtggattaaaatagatttagtgtatttatacactttgttatgaagggttagttaagtattcttgttgaaaaattgaaatttaatattctagaggcaatatttttagattaaagtgataactttttgataacagcaatttgataagagccaaataatatgggaaatatgaattttaaatgcataaaacaacgtcgaaactaaattaatatgtttaatgttagagttgtcttgctgtgtggaaatagagtgtaatactcctatttttaaaggctgaaattgtaatcaagtaaattggttgtccattccttttattttagatatcccttcaagtaaattatcataatttacttgaagggataaattatttttatagttttaaagagtttttattttttacaaatataatttaatactaaagattcaatgttaagttgcaaaatagtcaagaatagatttgtttcaaaattaatttatcatctaatagaaaaaaatttcaaattaaataatgattaaatttgtggtaaaactatttttacaaataatcactctgaaattagtagttatgcttaacctcatgcaatatattatcaattgcttcaacgatagatttaactttgtaccaagcttctattaattcgatactatcaggaatatgattttgagaatgaaccataaaattcaaaattttcattagagaactattgttgttttttgataatgatatattaattaattcggcttgttcggcatacttaggaaaatgtttagttatgtggttactaataaactctgaataaatttcatttactgtttgatttcgttttatacggtcttttgctatagccttcattttctggacatcttgatagtctaaatttgcaaagtaatcaatatattcatgtccatatacttccataagagaccttaataagaattgtgtagctaaacgaaaatccttatatctaatctgattaatctcaattactagagtatttatacgcacattagaatgatataaatttgtaaagggcatagtactacttagaagttttccgctccctatttttgggggtaattttggttttagagtggatgatatagattctatgcttttatattcagttttcaaaccagtatcttctcgtacactaattccattgtttgaagttgcttctttattttgtgtttgttgttctttagaatttgataatttattacttttatttttttgttcaatatgtatagaatttattgctttactttccaactgtttagattttaattcttctataatgggtattactatttgttcaattattttccttttattaaatttacgagaaatagataaattttcaattttagcaatctggtttactttttcaataacacctttaattaaatataatctttcacatgaaaaagaatctatattgtctttttcaatgcctagtgactctctcacttccaaattattaaataatctttggatattagtatatgccatttcttcttgaatatcttctttaaaaaattcttcatatttgtcactaataatctttgcaatagatgtactgttttttggattagttcgaagtttaaagatttcttgttccttagtattccaggatttaagacccctacctttatcttctcctgagtgtatacgcctcataatgaaaaaagcatcctcttcatctgttattaagcattcaatttgagagagatttatttttgaaggagtgtcacttttcatttttttgattcgatcaatttggttctttggtaaaaaactaaatttttctggatgtaaaattagttttatacatgcaactcgtctattaccttcatatacagtatatctatcggcattattgagttttacaattgtaactagacttgcatttaccaaaccattagtatagatatcttgtgccaaattaatcatattttgatatccagaaacatcaaataacttttttaaagtatctaattcattcagacctacttcatgcctaggattttcaatatagttatcaattttttcgatttctacatattttacacccatttttatacctccagaaaatgtaaatattcactatcttttattcttcgtgttttttttgagaagaataaaaattcagcacctctttttttttcttgcagggtataagataaagtaaaacaaatactatctattttattatacattctgctaatctctggcgctaaatcataagtaactatccattttttattttttaactcatttatgattttttgagataaagtttgatgatctccagtactataaaaattagtatacaagccttgtcctttttgatagtagggcggatcaaaaaaagtaaatccatttttctcaacttttattacatcatcaataaaatccaaagcttctaaattataaatttcgattttatctttcacttgtgcgatttttaatattttttctattaacttttccttattaaaacggcaatcaataagataatttcctgtttgttgatatccaccaattggtccagctttatcgattataccggatctgtttgttcgattgagaaagagggttgaaaatcccacttcaactacagaatggtcataaatatcttttcgaatttctttttgtctaaaccactcttcgatagtaacttcagacgaattaatcatatcaattaattcgtctgtataatcaaggacacttttccaaaaacagtatatactgtagtcataatcatttataattattctatttacatctttgctcaatagaagttctaaggcaagaccagaaccaccacaaaaaggctctatgtaggtatcaatatcattaactgctactagtttttttatatatttatacattttatgtttaccaccaggatatcttagtggagatgggttcattttgtttcctccaaatgaaatatttgcttaagaattgcaacaaatgctaatttaattataacataacctataataactaataaacaaatcacactaaatcattttttaaaaattgctctatgaaccctcaaaataaattttttaataattagctagctcaaaaaataaaatttcacatagttttatacttaaacttttcagagaggcaaaaaattgttttataaattgattttcatttataaaaagagggaaagcagtgaacttatgagttttaaaagcttattttatttacaaccaatattttatttttctaatacttattagtgattaagtattagaaggattccttactgactatatggacgttaataaatatatctttatctggcataaagttaaaaacgagtccatgggagactacgacggttttagggacttatgtttccgatactcaaaatgtactaacagaattaggcaatataaaatcattagattttggaatgaaaaaaaatagattcaatcttttaaatgcaccggatgaattatatattaatccaaaacaattttgggaggagtttaatcagcctttcctagataaagcgattcagcgaggagatgacgtagctatggctacaaagccgactgtagaaaacttatacatcgctgggactaaacaacttacgggttttggccgtgaatataaatacttactacaacatggttatgcttatgatgtaaaaacaagcacaatgaagttgaagaaatgaggaattcaagcatgaaattagacgataatgcaaaagaaataatccttaaaaaaagtgaatttctactccataataattttaaattaatagaaataacggacgctactatcacattttcaaacaagaaaattgcttttgtcatcggttatgaaagatatgataatgtaagtaatattaatataaagtttttggaagaaaatgaaatgtttaatcttggatggattgcttttgtaagaagaaatcagacgccgcttcctcagaataaattagataatatattagagttacttgattatgctgaaaaaaattatgctaaagttattaacttacaattttgccaagaaagtagaggaatgatagaagacttcttgaaagaataataactggaattatagtaaaaaaaggactgtgatcaattggatttccacaaagaagttgaaaaaacattcaaaggatacgagcaaaagtatcaattgatgctaactaaaattgataataatgaagttgctttcatcggagaaaattatgctttaggtataggttggagtacggacgggattgattggcattatttcaaactagataattcgatgctctgtaaatttagtctagataatttattaaacgcaaaactaactcacatagaacgagacggattatttcctagtaaaacaatttgcgagaaaataattaatgaattaataatctgcgaaagagtattcaataaccattttcaagaattgctacggggtgaaacattaagcgactatggaaataaagaatttgtttcgaatttggagaagagtattattgaacgtgaactattgactcgataataatgcatattaggagaaccgcattattcctatgaatttgattgcataaaatcttaatacaaaaataacaaagttggtgaaattaatggagtttaagcacgaagtagagaataactttgcgaatataattcaagaatatcgatttaacttaattaaagtaaatgaagacgaaataatgttattaaatcctaattatgctctaactatttggaaaagtagagaaggtattgatatttattacctgtttcttcatagcttagaaaaagtgaaaataaccaatttcttattttcaaattatgaaaaagatttgttagccaatataactcctgcaaataatttgaccgaccaaatttctaacagcttacttattcatgcgagaggtttaagtaaatatttccctgaattgttatctggtcaaaatgactgggtaaaggagtttaaagagaataagttttataatgagccgagagctattaacaaagacgagtattcagcctatcaaactattataaaaaatatcaacggcaaaaaaattgaaggatttcaaaatgagatatgaagcagattttataaatagattccaaccattaatagaagaatataagttgaattataaagttatatctgaagaggagctagcactttttggttctaattttgcgcttgttttttcaattcattttgatgaggtttctttgaattatgtatgtcgtgataaagataatttgcttgttagttatgatgtatggtcttattttttacatgtctttgatgataaagatagggagaatttgccaaaatataattctgtgcgtgaacgagtggatgtttcatttttaatacttgcaagaggtcttccacgtcattggaacaatgtacttaatggagatgacaagtggttggaagcttataagcagtataaattagccggtgttcctaaaaaggtaatcgggcacttgaaggatagtttgagtttaaatatttgaccaagaaatgttgagaatgtagcagaaaagaggagttcaactatgaaaatggacaataattcaaaagaaataatccctaaaaaaagtgaatttctattccatggggaatgcaatgtgttcttttttatatgaacaagagggcgtaagttatagtaagattcaacccaataggtcttttatggttatggagggcgcgagtgttgttgggagaaggaagatagtgtcgtttaatttgtaaatgaaagttaaattgatttatgcattttacacagtataattaaactataagaagaggctttgtggtgtagatagtaaatattagggggaaaagtagtgactataagaaaaatcaggttataatcagtatacacaattactgaggaggaaaaatgttgattccatcctatttgaaaagcacagctaaagagctaagtattaatgattttcttaatgtagaaattgtaacaataaataaagaggaaacttttgagattttatattgcggaacgcttaaagaaatagaaggcgatcagttaattactggggaagcgtacgaaatcccattaaaaattatagcgaaaagcactttatcggggaaagaaattttgctttatgatggcgcatattatggctatgatagtatgttttgtgatgagtttgaggaagaggctacacaaaatagagaattaaaaaaatatcctataaataatttatctaatattcgtttatctataggaattggcattgattatgaatcagagaaagaagaatatgaatttgatgaaaatggtcatgtagttttaattgacgataggcatataccatgggaacaagtaaaaacggacggttttgattttctagaaataacggcaacagatgaaaatggggactctttattaatcttgaccgaagaacttgcgtaaataaaaaaataggaagttgaaaaaatgatacttataaataaacgagcggaaaatcaagattaccagatgattttagcgatttgggaaaagtcagttattgcaacgcatgattttttagctgcggaagataggcagttttacaaagaacaaattcctttgtttctagataatgtggaactgttcttatggtttgctggtgaagaaatcgttggttttagtgggacgagcgagcgggaactagatatgttatttcttaatccgatagctacgggtaatggttatgggagtcagattcttatttggttaatagaaaataagcggataaacttggtggatgtgaatgaacaaaatgaaaatgccacgagattttatttgaagcatggatttgtggtttcttccagaagtgacttggatggttttgggaacccttatccaattcttcatttacaactgaaggagagagttaatggaatatgaacagctgttacaaaacgaacttggtgaacttgaaataattcaggaagaactacaaaacaaagaatatcgaggaatgattgtaaagacggctaaagatggcacaacgattcgtacgcgtttggcgaagaaaacggataaaaaagcagggtactttgttgctttttgggagaaagatgaatttgggaagaattgtccttttgatgagaatgattgcgctgattttttatgtattgttgttattgatggtgatttgaacggtttatttgtttttccaagacaatgtttaattgataaaggaattttaactagtgaagctagtattggaaaaatggctgctagattttatccaacgtggtgtcaggatttaaataaaacagcgaaaaaaacgcaagcttggcaacaggtgtattttaaaaattattctataagaaaagaagaccattaattgggtcttctttttattgtttagaaactacttgctcgcagtaatctaagtaagcattgtctactagaaaatattttggaaccattaagccaacaatattggtgagtagctctgaattagcgatggcaggattaatcatttgatgcgagacatttgggatggtttgggtttctaggttttctttctttatttgttgggtgtaaacatcttttgtttctgctgaatcaacatttttatctttttcagctaaggcgagatagatttttgtttttacttttgaaaggtctagggtggcatcttggttcatatttttgcgaatgaagttgtagcgacccggggtcatttcttctttaccgccattttgtttgtagctttcgtaggttttgtttttagaaataagggcgctatcggtgaggaaattttgttgtgcttgcttgacttctttagttgttttaccagtgtctttcgcttgccagcaggtgttgtattctccttggcgcatccagttgatagcaggggcggcaagtattgaaaagtcaatctcattatttgcattcattgcttttggaaccacccaaccggcttgactagcgccccataagccgatcttagccgtgctgtctgggtattttactttcatccattcgatcacttggttgacttcgtttgcgcggtcatccatggactgatttagccaattgccagaggatttaccaacgcctaatttatcccaagaaacagatatatatccttgcttggcaaagcgttccattagcggtttatagccaccgttttgagttgcttcttgtgccccgtcaccgtgaacaaacacgataataccttttggtttgccgtgttttggggttgtcacgaccgcagaaagttttccaccagtagttggaattgcgactcttgtttcgttcatctcgtaattgtttccgatgaaaagaatcgctactaatatgacgatgattgcgctcattatgatagttatttttttccaacgtttaattgtatccactccatttttcgccattctttgataccggtgagtactcccatcaatgtgctattttctttttgaatcacttggaagcctaaatttctatacagcttgtaggcgccactatttttcttggcaacgtataaagtaatcttctcatcatgaaaagtttctaggcaatgagaaattagcgtttttccaataccttgaccacgaaaatttggcgaaacggttataaaatcaatatatcgttcattttgaacaggtttgtgtgatagaagactgagtaagaaaatcaatttgaggcactgtgaaaatgataaaaattttcttaaggtttgatatagcttttgataagagtcactcttgcttgttacaaacaagcaaccgcaaactagctcatcttgtattgcaattagtagattttcgcctttttctgtataaatgtaatggcaaaaagcgtatgtaatgtcatgtgcttctgtttctttgaatagcgtttttgtgaactttgatttgaaccctgcgaaaactaaagatgctacttcttcaacgatgctatctttttcaaatgaatcgatgcttttaatggaaagggtcataacggcacttccattgtgtaaaccattgcgtccggataggcgagtgaagggtagatgttttcgtataatatcatgcttgttgtaggatattttaattcttctaaaaatagttggatttgcgtttcaatagttgcttcatctttggcaataaaagatttacaagcatattcgccagccggaaaagtataatcactcctttttttaatgctcttaaggcagattacaccagtgtcttgtttggagaaaatgtaaaaaggttcctctaaatccggtagattgtgttttgcggcttgggagtagttgatagtgttatgatcaattatttggttaggaacttttttaaaataacgatcgtctttagctacaaacgtgatttcatttaaacgcatttctttttgcgaatggatgattttttgaatcgttttttgaatttctactaactcttctattttttgttgcaaatcttgttcagcctgctctaacatcggagtcactttttcaccaagcaaactttctttgatttcttgaatagaaaagccaatttttctaaaaaggataatttgatataaacggtaaatgtcggcttcttcaaaataataatagccattttcaggatttcttttaggaactagaataccttcatcgatataatgacggattttatatttagatatttgaaaaagttgcgcgatttcgccagtggaaagagtaagcatctgaatacctccttgtgatttagttttagtataaactatgtggttaccacgcagtcaaataaaaaataaatgacaatgagaatcattatcaaatgatgatttttgtgatataataaacaaagatttattgatgggggttagcaatcaaatgggaaaagtagtattaaatatggctcatactgccaaaaaatcaaagaaagtattaaggtatcttgaaacgaaccttgatgtaactcgggggaagtacaatgattgataagcgtttatttcaactggttgaaaagaaatctttagtgttattaattctttttcgtgtacttagtttggggctgatgattggtctttggcttgtttttgctcaacaattaacgcattatttagagggtcaaaatgtcgattggttatggcttattgggacggttttagttgttttagttggcaaagcgatacttaccaaattagcggagaaacaaatttaccaagcatcagcagaactgcgtttatcaatgaggcgcgctgtgatggaaaaagcttttcggttaggcaacaacgaaggacagttaccggcatcaactttaacgcagctcgcggtagatgggattgaacaattagaaatttattattcacgttttttaccacaattattttattgtctcatcgcttctttgatgatttttggaagtttagttggatttgcgtggcagccggcgattgtgctattaatttgtatgccgatgattccaatagttattatggcagtgatgaaaattgctaaacggattttgagtggttattggtctgattatacgaatttaggaaccaaattccatgaaaatttaagtggtttgagtattttgaaggcttatgatcaagataaatataagcaagaggaaattgtttctgatgcggaacgtttccgtaaagctacgatgagtttgttatcgatgcaactgaattcgattacgattatggatattatatcgtatagtggggcggcacttggtattggtatgtctttaattatgttcaccaatggcacgattagtatgactggcatgttgatgttcttgctactaagcgccgaattttttattccaatgcgtcaacttggatctttattccatgtggcgatgaatggaatcagtgcttgcagtaaattgttcgcttatttagagttaaaagaacaagtttatggctcagtagaattagctaaaccgttagaaaagatagaagttcatcatttgacatatacatatgaaggaggtaaagctaaagcacttcaagatgtatcagttcatttcaataaaggaagtttttctgcacttgtcggaaagtctggttcaggaaaaagtacttttgtgcgagtgctattaaatcaattacctggttatcaaggggaaattgtttggaatgatgtaccgttagcgagtttgagcggggaagctattcgtaaacaagctgtgttagtagataatcatggttatctttatgcaaatagtattcgggaaaatttattaattggtaatccagctgctaatgatagcgatttgtggaatgttttagagcaagttagtttggctgattttgttcggaagttaccagagcaattaaatgagaatttagaagaggacggaagtaatttatctggtgggcaaagacagcgattgttactagctagagctttgctacgtcaagcggaagtctatgttttcgatgaaattacgtctggtgtggatttggaaagtgaaaaaattattcttctagtgttgcaggaattagctaaagaaaaaatcgtgctctttatttcgcatcgcttatataatgttttgggtgcagatcaggtactcgtttttgacgcggggaaattgctggaagtggcgagcccagaacgattacagcaagaatccaattacttcaaaaactactttttagaagaagaagcgttgctgaaagggggagcatgacatgtcagaatggacgattattggctggttgttaaagtttgttaagccgttacgagggaagatgattttggcgattttacttggtattataagtaatttatcggttatcatgatttctttaatcggtacatatggcattatcgcggtaattttacagcagccgctgaatccgtataaatggctctttgtaatggtagcttgtggagtggttcgaggtttggcgcgatatttggaacagtatttaaatcatgacattgcttttcgcttgcttgcgattattcgtgaacgtatttttgcgactttgcgtaaactaggaccagctcgtttatctgggaagaaaagtggtgatttagttgccgcgattacaacggatgtcgaggctttggaagtatttttcgcacatactatttcgccagtttttattgcacttggtacgacgatagcaacagttggctttttggcaagctatgatgttggtttagcgatcatacttttggtaggtcaaatcatggttggtgtcgttttgccgatgattagttataaacgaaacaaaaaaatcggaacggcttatcaacaagcattcgttgggctcaatcaaatggtgatggaaaatattgcaagtttacaagatatttttcagtttaaattaggcgaagagcgtttgagaaaattagaaacacaaggtgaaaagctcaataggcagtataaaaaaagaatacgccaaggaagcgagctccaaatattgggtgaatgggtgctaattggtacggcgacgattattttagtgctaggtagtctttcacaattgccacttgaaacagtattaattggaaccgtacttagtctgagttcttttggatcagtgttggcattaaatgctttaggaacggcgctgttaaccacatttgctagtggtaaaagattatatgctttaacagaagaaaaacctgttgtattatttaacggtcagcttgaactatcggattttgaaagcgctgagttagataaagtgagttttagtcatgatggaaaacaaccacttttaaacgaactttcgctagcgcttcctaagggtaaatggcttggcatcggcggggaaagcggcagtggaaaaagcactttagtaaaattactgatgcgctactgggatccagatggtcaagttaaattaaataataacgaactccctaaaattacagagtcttcgcttcatcggctagaaggtgtaatggagcaaagaacatttttatttgaagacacacttggtaataatattcgtttaggtaaaaaagatgcaactttggaagaagtcaaagaagctgcccgaaaagctgctatcgatacttggattgaaactttgccagaaggatatgagacaatcattggtggacaatcacgaaatttatcagatggagaacgccaacggattggtttagctagattattccttcatgacgcaccgttattattactagatgaaccaacaagcaatttggattatattaatgaacaagcgattttaaacacgctccgttcagaaattcaagataaaacagtgctggtaatttctcaccgagcaacaacattagacttggcagaagaacaattatttatagaaaatggtgcattgaaacgtgcagcaaaataataaaaacagcttgtataaattacaagctgtttttatttataaatttaccttctctgagctttcgaaaaattcaaccgtgtcaagttccgcagcaaaaaattctttcgtatagttctgttcgtgatggtaataaaaggattcctgattctgccaaatttcccacaaagcaaatctgccgagtgcactttctaaaggaacaatctcgaataaaacacaacctggttctttcactgttttagcgcgtaacgcctccaaatgttcaaccagctgttcataagaaactttgccggtagtttgaataactgctgtgcaatataaataattcgtgttttcttttaaatacatttcttctcctcctttgaatatgttaagcttaaggtatggagtacacccgatagcaaggaggaactagatgtatattaaagattttgccactaaaacggggctttcgattgatacgcttcgatattatgaggaagaaaaattattaatacctgctagaaatgaaaaaaattatcgtgtttatacggaagaagattactgctgggtacagcttttacttaaaatgaagcaaacagagatgacaataacaaacattaaaaattttgctacattacaaaagcaaggagataaaacactcccaaatcggatacaaattttagataatcatatggaaaacttgtatgaacaacagaaagatttagcagaaacgatttcttttgtggctaaaaaagtggatgggtatcgagagaagttataaaaacaacaggaaaggcgagtaatgatgattaataacgagatacgcgaagtgatcggattacatccgatttttgaaaatgaccaaaaattgactgtggaaaatgcagaagtaatcatcagaaatcatgtgctgataaaattgattcttgatcaagctgattgttacaaagaaatcgattataatatagagcttacagatacaaatgaattagttggccgaaaaaatgcaaaaccaaaagcattgacgctaaaagcaattttaaaagctaaaacaaaagaattaagactaaaaataaataaagtcagtcatcgaatagagctaaaactaggtgttcagcattttgaaaatatctattttgagaaagggatggttttcaccagagaaaatgttcaaacaaaaattacggaaaattatggtagtgactggttgggcacattagataaagcaaagctcaaagtgaaaacaagacaaaccattcagcaaggttccattttttcttatccaattggaaatgaatatggtttcgggcttgtaattggttgttttcagatgtttcggaaacaaaaaataatgcctcaagatagctcgcattaccttaatttaatgatgggagttccgcttgttattcgtagctttaactatacaagtaaacaaaatacagtcgatttaccacttttgaaaaaaaggcagctcttaaatccggaatttattatggatgatttagtgttgcgtggggattttccgattattggtagggtagttttggaagaagcggatattctctttccaatgaatttttcttttaatggagtgtctacaacttatgccggttatcaagcaatagatgaaccagatagggatattattaaaaagtacgaggaagaaattaccattcgatttgattggggatttggaagcaaaacgatgactgcgaaagagtttttgaagagaaggagtggaaaagagtcatttctgtcttattctggattaggaatgacgccaattgctggatattcaaaaaagttaatttctcctaaaacaatattcactccagaagaactaaaacaaatttatgaagttttagatatagatggggagatatcgtttgatgattttaatgaaaaacacaatgggattttggctcaaaacatgttatcaattgatgggaaataaaatcttgtcccattcaataaaagcgcggtccatttttttaagtttattttctgtatgaagaaataggtccaatttttttaatttgtcagcataaaaaatcatgatgcgcagcttttaactagttagtaataatagtatgatggttgaaaatctacaagttcggtaaaatatgaaagctattaggtaagttaggtttaataatccaacttacttttttagtagtaaaaaatactgttttctttcagaagttcattttttagacacaattcagcgagaaccaaattgttttgtgaagtcttgagaagtcaatgatagcaagctcgagtgagaagaagtttgaaaattaaagcaagaatagaggcttactcatttcagaaaaacaggaaaaaccacttttttattccattgatttaggcacattgtcgaggtattatgttagttgacaatcaaggaggatactatgaaaaaaactatcaagattacaaccagtttacttttgagctttgcttgtgtatttagtattggggattttactaagccgcatacagtcgaagctgaaatagtctattcgcttacaaatccaaagccagttaatgaaatttttactgatccaaaactcgcgcaagttgtggcggattggttgaagcttccagctgcaactagctcggttacgcaaacccaattgaatacaattaaagctttgcactttgattcaaaaggtgttcaaagtcttgaaggagtagagtatttaaaaaatctcacgcaagtatttggctatggtaaccaagtgagtgatttagggccattaagtaatttaacgaagctagaagtcatccagatgccaagaaatcaaataagtgacttaacgccaattgcgaatttaactgcattaatgtcacttgattttgagtttaataacttacaaacgattgaaccgataaaaaatttaacgaacatgttagaactgaatgttagcgccaatcctatttcggatattaatgccgttaaaaatatgacacagctggaatttttgactttaagagactgtgaggtaagtgatttatcgccagttgaaaatctgtctaatatgctgatgttttgggcggggagaaataatattagtgatattacgccgctcaaaaatatgtctaaattgcttggtttaagtttatttgggaatcaaatcaaggatgtgagcgtaatcaaaaatcttactagccttgaagacttcgatataaaagcgaatcaggtgagcgatattagtagtttagcaacatcaactacactcgagacattaactcttagtttcaaccaaataattgatatttcgccactgaaaaatttgaccaatttaactagattagaactggagaatcaaacgcgtgcactagatgcggttgagatagacaatccattgattttacccgcgccagtaattgatgaaaatggtagtagagtacagccatcaaaagtgagtcatgcaggtgtttatgcgaatggcgagattacatgggaagggttgcaaagtaattatattttaaattacgaatacgctttgcccgtaacaattggttcgttgacaacaacgtattctggtaaaattacgcagcctttgttagagaagcctgttgatccggtcactccagtagatccggtagatccggtagatccggtagatccagtagatccggtagatccggtagatccggtagatccggtagatccggtagatccggtagatccagtagatccggtagatccggtaaacccggtagatccggtagatccggtagatccagtagatccggtagacccggtaaacccggtagatccagtaaacccggtaaacccagatccagtaaatcctatgaagccagtagagccaatcattccagttactcttgaaaatcaatttaccttggtgaatcagactatttctgttaatgaggaaatagcaacacaaccagctaaggatattgtgaagttaccgaaaacaggagaaagcggaatgacatctagtctatttggagggttaatactgactgttactagcgctattttactaagaaaacgaaaataacaaaaaaggaatttggcaaatgaccaaattccttttttacttaaatgattcttgtcccttgatgaaaagtaagtttccatgaaccgttttcgaaaatccagatattacttcgcattgtatagttgttttcgcttagatttttgagtttatagtaagagaggacttttgtttcgtctaaaatttttacgtcatattccatgattgctaaattgctatcaccaagtgttgttagtgatttataataagcataatctttaacaacaccactttgcgtgatttcaatgtaagattcgcttaaaatatcgattatttcagacatggagtgacggttttcgagtgataaatgaattaggtcaagtttttggaaattttctttcgttaattccattgtaggtcctccattttaaagagaataaaaaaggttcacttacaaaaagaagtgaaccttttggttttattttaagccatcgcgattttcgatgatttcatttacgatgccgtaatcttttgcttcattaacagaaagccagaaattacggtccgtatctttagaaatttgttcgtatgattgaccggttgcttcggcgattaagcggttaattctttcgcgcatccggataatttcttttgcttcgatttcgatttcggtactttgaccttgaacgccgccagctggttggtgaatcatgtagcgcgtatttggaaggctaaagcgattttctttttcagcggctaagtaaatcgtaataccagcacttgcaacccagcctgttccaacgactttcactgttggtttaatgaatttaatcatatcatgaatcgtatcgccagcttcgacgtgtccgccttggctattaataaaaatcgtaattggatcattgctaatagattctaatagtaaaagttgcttagaaacgtcctcggctaactcctgattgatttccccgtaaattaacactgtgcgtgtatcaatcaatttttgggtaaggatgtttgtgatattttcattctttgtattctctgccatgaaaaaattcctccttaaaaagccttagtttatttgtaatataggtatcttatcacaatggtcgaaaatggtcaaacattttgaatgtaaaaaagaaaacgctttaggtcggcgttttctctgatactaatagctaaaagggcaggtattaatctatttcttgtatgacatactggcttaaatcggttattttcccttcgcgtattccggggattaatgtttcaatttcttcctccacataaaataattgtaaccatttttgctcgtccttttcagagtaagagaggtttacattagtttgattggtttgagggtttttggaagcaaatacgagagatacgttgattgtttttagttcttcgtttagtttaatggtaacctcttgcatggtttcctccttaaaggtttcattttgtaaactatagcatggatttacttgaaaaaacagtattgaatagggggctattcaatactgttctataattaattatttttctatacgaatgcgagttgccaagtaatgccatatttatccgtgacccaagccacttttcgaagcgcttctactgcttctggtcccatcataaccgtgccttctttagccagtttttcaaaaagggtgtcgaattcatcttccgtatctgcaaaataaagggttgttgtggcccagctaaagttcggggaggcattgttagtcatatccataatcatgaaagatgcccctttcatctcaaaagtagcattcagcactttaccgatatcgccaccttgctctggtttcgtgaagtaagttaggccgacttttttcgcgtcaggaaaagtatctaaataaaaattaaacgcttcctcgccattcccattaaaagtgaaaaatgtggagattcgtttcgcttgattaaacatttattttacctccttttgaattattttaactatacccgaaaaatgtttcaattatgtgttaaaatgaagaaaaatgtgcggaggtttgctgatgaaatacccgataatgcttgatattacagggaaaaaggttgtcataattggaggcggaaaagtggcgcttcggaaaattacgggtttgctggacgcgggtgccgatattttggtggttgggctaaaaattttgccagagattaaggcgctggatgtgcgggtagtggaggaagcttatcgaccagaacatcttcatgctgcatttatgatatttatttgtacagataatttagaagtaaatcaatgtgttttgcgtgaccgagaagcaggacaactagtgaatgatacgactgaccaagcaaattctgatttttttaatatggcgacagtaacgaaaaatgaactaatggttgggatttcaacgggtggaggtaatccaggctacgcgaagaaagtgaagcgtgaggttagtcaattggtagcaaatttagaaacggaagaaatcggaaggcgtaataaaaaagataaaacctgctaattttagtaggttttttattctattatattgctctcttttaggttgcaaaattttactatagattttggaatgtaaacgctctatcattgaagtatactgaaaaactattaagagggtgttgagccaaatgtccattttagaaaagattaaagatgctggcgttgttggttgtggtggagcgggctttccgacccatgccaagtttagcggcgaagtggaatacttaattattaatgcggcggaatgtgagccgttactaaaaaccgatcattttgttatgagaaaccatgcagtagaaacaattaaagcaattgaaatggttaaaagccaagtcggagcagaatttgctgttattgcgacaaaacgatattacacagaggaaattgcggctctgcggtcagcaattacagaactagatgcaagcgtcactattcatgagatggataatgtctatccaaccggtgacgagcaagtcatggtgtttgaagtcactgggcgagtagtaccaccaagcggcattccactaatggttggttgtattgtatcgaatgtttcaacgatgtggaatgtttttcatgcaattcaagacgatgcaccagttgttcgcaaacagctaacagttacaggtgcagtgggagagccaaaacttttagatgtaccagttggaacgccatttgaagtttgtttagcagcggcaggcggaaccaatttagacgagtatttgttcttagacggcggaccaatgatgggtaaattaaatgaccaatcgactatcgctgacaaagtagtaacaaaaactacgtccggtttgattgtggctgaggatactggttatttgcacaagcttcattatcaaactgtggagcaaattttcaatgaaacaaaatcagcttgtattcagtgctcgctttgctcggatttatgcccacgacaacaattaggtcatgatattcatccccacaaagttatgcgccatttcgcggttgcagaagatataacggatatcaagccagacccaatttgggaagaagcgatgatttgttgtgaatgcggtatttgtgaggtaatcgcttgtccaatggggctttcaccgcgtcaagtaaacattcacgtaaaaaaagaacttttaaaacaaggtgtacgttatcaaaccgataaaaaagaattcacgcctgatccgatgcgcgaatataaatcaattgctccaaaaaatattttaatcaaaatgggcttacagcaatatgctgatgttcatttagaaaaaatgcattatttagaagtggatgaggtatttatcccaacaaaaatgcatattggagctccatctattccagttgtgagcgagggagatatcgtgaaaaaaggtgatttaattgcgaaaattcctgatactgctcttggggcaaatatccatgcaagtattgatggccaaattattcgtataaccgaagaacaagttcatattaagaaggtgatgtcatgaaaatggatacgttaggatttcttgaattaaatagtatttcgaaaggcatcgaggcggtcgatacgatgctaaaagcggccaattcggaattaatttatgcaaaagcgagctgtccagggaagtattatattttaatcgctggaacagtggactcggttgcacaatccatcgaagcaggaacgaagattggcgcggcgaatatcgttggtaacctagtgattccacgtgtgtctgatcaagtaatcaaagcgattaacaagacagaagttccagacgaaatgaatgctgtaggtgtaatggaatattattcgtgctctggttcaattatagctgcagacgccgcagtaaaagcggccgatgttcagttaatggatattcgtttagcgactgggattgcaggtaaatcatttgtcgttttaactggtgatacagcagcttgtgagactgcagtggaagctggacttgctgcagccaaagaagaagcacttttaattaataaagtagttattccaagaccacgaaaagaagtttttgagagtttaatctattaaaaagataacaatatattgtcatagaatttttgagaaaggtacgcactgactgtggttgcgtgccttttgaacaatctgacaaaatagtggcgcttaaatatgataggattattttgagatagtttgtctagatgaggagtgaagaaaatgagttttgatgataataaagagcgtgtaatacaagaatatgtaccaggaaaacaggtgacgttggcacatttaatcgccaatccgaaccgtgatatttatacaaaattaggattagaagaaggcgcaagtgcaataggaattttaacgattacgccaagtgaggcttcgattattgcgagtgatattgcaactaaatcaggtgacgtacgaattggctttattgatcgttttagtggttcggttgtactaactggagatgtttcttctgttgaatcagctttacaacaagtagttttttcattacatgaaattttggacttctcgattccaaaaattactaggagctgagtcgcttgaagaaaatgatggtaatgggttcagttggttgtggtaaaacaacgctgtgccagaaattgcatgggtatgatattttatataaaaaaacacaagctgtggagtattttcaagaaatgattgatactcctggtgaatttgtacaacatagacaactctacagcgcgctcaccgtgactgcagctgatgcatcagtaatcgctattttacagagtgtaacggaaaagaaacagacgttttcgccaatgtttgccagtatttttgctaaaccggttattgggattgttacaaaagtggatttggcagaatcggataaagacattgaacgagcagagcgagaattacgcatggctggcgcgaagcatattttttatatttcttcggtagaggaaactggaatagaagaactacgcgcatatttggaagattaattttaactaagtggaggtttttttatgcctcaagtgagggatttgtctgtaattgatgtgcctggtggttgtgttttgacaagctgtgatattagtgctggattcggcgagaaaacgcatgatggtttaatggtcgctccagaggtgacggctcgtttgactttgagagtggctttgattgaaatgattgcttctggtgcggaggttgtagctgttagtgatgttgtcggaggagaaatggaacccaccggcagacgtgtcattgttggattaaaggacgaacttaccaaagcaaatttaagccatatcgaattaaatggcagtacagaagaaaatatgaaagtaactcaaaccagcgtaggggttcttgtaactggttttgcgactaaagctgcactcaagctcataaatgtgcatgaagctgcggtcttatttgcatttggcgaaccgattgtaggggcagaagttttgcaaaaattgagggatatgccagattatcgtttagtgaaaaagttggtggaacataacgatgtgcttgaagtagtaccagtaggttcaaaaggaatggcttatgaggcacatcttttagcacgattaaatggtggcatttttgttccgagtgatacttttagtgaagcggtcatgaataaaactgcggggccagcgtctgttattttagcagcggttaaagaggataatgtaaccgcatttgagcgggaatttttaggggctaaacgtatcggattgttacgcggaaatgaggaatggacatgagtgaaatgatgcttgtaactggcggggcaaggagcggtaagagtagctttgctgagagagaagcggccaaatatgatcgtgttttatatgtggcaactggtattgcattcgaaaaagatacggagttccaagccagaatcaaaaaacatcaagctactcgtccagcaaattgggatacattcgaagcttttcaagggattgctagttatttagaccaacattcgacccaatatgatgtgatgatgcttgactgtgtgacgatgctagtaactaatttgttttttactttgcttggtgagcgtgaattgacgaatgagattgcggatgaagtcgaggcgggaattcaggctgaggttagcgcgattttggaggctgggaaagcgtctcaagccaaactcatttttgtgacaaatgaaatagggcttggtgtcgtgcctgaaaataagcttacacgtgtttttagagatattatcggtcgagtcaatcagcaaatcgcaactcaagtagaagaagtttatcttgtcgtaagcggcattccgaaaaggtggaagtaatatgaaaacattgattttactaattcaattctttacacgaattccgctacctatccaaataaatatggatgaaatcaacttgaaaaaagggagcgccttgctgccatttgtcggggtgattattggggcttggaattggctcatttttactttggtggcgcttgttatgcctttgccggttgcgattattgcgggactttttgcagaggttatcattactggcgggttccatgtggatgcactggcggatacggcggatgggctgttttcttcacgaaaaagagagcggatgttggaaattatgaaagatagtcgcgtaggtgcgaacggtgtgattgcgatttgcttttattttcttttttatggcgctttattcctatccgttactgatacgcaacaaatttgttggctatttttcgtcttaccaattgttgctaaaggtgtgacaatgttgctttttgcaaaaatgacctatgcgggatcgaaagaaggactaggttcgatttttctaggagttccttggtggccgattgtgattgcgcaagtgattgtgttagctgtgttagggctatttttctcctatgttggtgttattgcttatgtgggtgtgattttgtttacgattatttaccgggcatttgtttataaacggattggtggcatgaatggggacacgcttggtgcgggtggacaaatggggcaacttatatgtttattttgtttagtgctactttgggggttggtttaagtgcaacttatttttgcacgacacggggagacggactggaatgtagcgaaaaaatattgtggtcagcttgatgttcctttaaatgaacatggtgttcaacaaatgaaacatctccgcgaaaagctggaggattactcgttcgatttagttgttacgagtgatcttatgcgcgtgaagcagtcagcaaacattttgagtaatgcaaagacggttcggtttccggctttgaacgaaatgaatttcggtgactttgaaggttatacatatcaggaaattagcactaagtttccaaaggcttggaatgaatactgtaataattggcaaactgcattatttccaaatggggaaagttttccgatattttatgaacgagtggttgaagtgttggaagtggaaatggaaaaatggcagcaaatcgatacggtattgctcgtaggtcatcttggtgttttgcgagtcattgcgctttttttacaaaaacaaactatagcacaatattgggatatcgattttaagcaagggtgttattcactctgggacaacaaatctcaacgttttcttatttccaatcaatagtagatttttgttgtttcagatgaaaacggtttttttataaatactttgtggtaagatgtaggtagttaaataggtcttatgttggtggaatgtatgtacatttctgaaagaggaattcggtgcgatgccgaaactgcccccgcaactgtaaggtggacaagaatcgagataaccactgtacgtttttagcgtatgggaaggttcgattgttggatgaagccaagtcaggatactcgccaaataagacggaagcaactctttttcggggtcctaaaaagcgtatgcgggtagtatagcttgtttgctgtgcataaactctcattcgataacggatgaaagtttttttgtttttcaggtaacaaaaaagtcatatccttaaggtactagaacatgacttttgaaaaatacttacttaaaggtttctcggtagccttttggagtgacatcaaactcttttcggaagactttacagaaatagcttgtttgggtgaagcctaagttgcgggcgatattatcaatggacaaacgcgggtttttcaacatttctttggcaagtgacatcttcttctggttcacataattaatgaagttcacattcatttcttttttgaataacttactaaaataataagagctaaggtacacgtgacttgccacttcgtcgagagtaattgggcggttaagatttttctcgatatacttaagcgctttccgaatttctttattttcttcatgatgcgctacttttgtatgatgaaaaacgattttttgcttttgctcttcccggcttttttccatttcggattttaagtaatactgggaaataatcgttagcatttcggcagaagagttaatttttttggagctgaaaacagggacagagcgaaacgcggagataagatccttatcgtttttccaatcggtttcttctgtttgaatattgccaacttcactactttcttcacaaataacctggccactgagtaaaaatccactaagttggttttcgacaacgatagggactgaaaaatcagttaatccggcgtggcatcgataaatcaaaggttttccagttttggatgcttccagtccaccaaacatatcacatttttggcaaagggagcgatatttgggattggagcgaataagttggcaaaaaggagtaaagttacataatctagaaacttcggtaccgtgtatatctacaacaactgaggctaaactggttgcggctgagaactcatccatcactttttcaatgagcatttcgttgcttttggactgtagtaacatagctattcccctttcggcgagacttggcgtgtttctgtcgttcttagtatagcatatttataatgcgcttacattttcttgccatgaagataacaatatattgctaagagtaatttcataagagaatgcccaaaccatgcattactggatggctttttgtcattattttttttgaaggcgcaaaattgtgttaaaacacgattcgcgtcttcttttttctatttggaagcggcaactatttatattccagattgcatatactgagagagtaaaatacttattttgagaaggaggtacacccatgcaagaagcactaggcttagttgaaactaaagggctagtcggcgccattgaagccgctgacgctatggttaaatcagctaacgtaacattaacagggtacgaaaaaatcggttctggactggttactgtcatggttcgtggcgatgttggtgcggtgaaagcagcgacagaagcaggagcggcagcagcaaaaaatgtaggtaccgtgatgagtacacatgttattcctcgtccgcatactgatgtggaagaaattttaccagtgagggtgaagtcagatgagtgagcaaaataaactgattgacgaaattctaaaacaggtaatggaaacggtcaatgatgccccggaaaaactagtagaggatggaggatcacgtcaaatgagtgaaaaagcagttcaattaacagagtttgtaggaacagcaattggagatacaatcggcctagtgattgcgaatgtagacggacaacttttagaagcaatgaagcttgagaagtcttaccgttctataggtattttaggagcccgtactggtgcaggtccacatattatggctgcagatgaagcggtaaaagcaacgaatacagaagtagtaaaaatcgaattaccacgtgatacaaaaggcggtgccggtcatggttctttaattatctttggtggtgacgatgtttcagatgtgaaacgcgcagtagaagtggcgctaaatgaattagataaaacttttggagatgtttatggcaatgaagctgggcacattgaacttcaatatactgctcgcgcaagtcacgcacttgaaaaagcattcggcgcgccagtagggaaagcattcggacttatggttggtgctccagctggaattggtgttgtaatggctgatacagcagtgaaatccgctaacgtagatgttgttgcatattcttcaccagcagatggaacaagtttctccaatgaagtaattctttgtatctctggagattctggcgcagttcgtcaagcagttatttctgcacgtgaaattggtaaaaaattacttggagctttaggggatgaaccgaaaaatgatcgtccatcctacatttagaacggagggtaacgactgatgaaatcaaaacgctttgaagagttagcaaaacgcccggtcaatcaagatggttttgtaaaagaatggattgaagaaggcttaatcgcaatggaaagtccaaatgatccaaaaccaagtattaaaatagaaaatggcaaagtagtcgaaatggacagcaaaaaattagctgattttgacttaattgaccatttcatcgctaaatatggcgttgatttatctcgtgcggaagaagtaatgcaaatggattctgtgaagctagcgaatatgctttgcgacccaaatgtaccacgtgaaaaaatcgttttacttacaactgcaatgacaccggcaaaaatagtagaagtagtttcgcaaatgaacgttgtcgaaatgatgatgtcgatgcaaaaaatgcgctcacgtagaacgccaacaacccaagcccacgtaacaaacttgcgtgataatccggttcaaattgcagccgatgcagcagaagcagcgattcgtggctttgatgaacaagaaacaacagttgcggtagttcgttatgcaccttttaacgcgcttagcttattagtaggttcgcaaactggtcgcggaggcgtactaacgcaatgctcattggaagaagcaacagaattagaactcggtatgcgcggtttaacttgttacgctgaaacgatttctgtctatggtacagaacctgtatttacagacggagatgatacaccttggtcgaaaggtattttggcaagtgcatacgcgtctcgcggtttgaaaatgcgtttcacatctgggactggttctgaggttcaaatgggttatgcagaaggaaaatcaatgctttatcttgaatctcgctgtattttcattacgaaagcggctggtgttcaagggttacaaaatggctcgattagttgtatcggaattccaggtgctgtaccaagtggtattagagcagttcttgcagagaatttaattgccgttatgttagatctagaagttgcttctggaaatgaccaaacattctcgcactcggatattcgtcgtacagctcgtttactgatgcaatttttaccaggaacagattatatttcctctggttacagcgcaacacctaactatgacaatatgttcgctggttccaactttgatgcagatgactttgatgattacaatattttacaacgtgatttaaaagtagacggtgggttaacaccggttaccgaagaagaagtcgttgcagttagaaataaagcggcacgagtaattcaagctgtctttgataaattaggtcttccagaagtaaccgatgcggaagtagaagcagcaacgtatgcacgtggaagtaaagatatgccagaacgtaacatggtagaagatattaaagcagcagccgaaatgatggaccgcggtgtgactggtctggatgttgttaaagcgttatctgctggtggattcgacgatgttgctgaaagtgtactaaatatgttgaaacaacgtgtatctggagacttccttcatacatcagctatcattgataaagactggaatgttattagttccgtcaatgacttaaatgattatgcaggtcctggaactggttatcgcttagagggcgaacgctgggagaaattaaaagatattgctgttgcagtcgatgcaaacgaattagactaagctacttcccattttttataaaggaggattacgagacatggttgaaattaacgaaaaagtgcttcgcggaattatttcggaagtgctagatgaattacagctaaaagaagataaagtttctttccaaaaagaacaaccaagtgttgccgtttcagatgaaagctttttaacagaagttggggacgcggagccgggtagacaaaaagatgaagttgttattgcggtcgcgccagcttttggtaaatatcaaacaaaaaatattgtcggtgttccacataaacaaattttacgagaactgattgcaggaattgaagaagaaggattaaaagcgcgcgttgtccgtgtattccgttcttctgacgtagcttttgttgcagtagaaggcgacaagttaagtggttctggtatttgtatcggcattcagtcacgcggtacagcattaatccatcagaaagatttacaaccactttctaacttagagctattcccgcaagcaccactaattacgctagaaacataccgagcaattggtaaaaatgcggcgaaatatgctaaaggtgaatcaccaaatccagtgccaatggtaaacgatcaaatggcacgtccgaaattccaagccaaagcagctttacttcatatcaaagaaacaaaacatgttgttcaagggaaaaacgcagtcgaattacaagtaaactaatagtgaggtgaaaatgatgaatcaagaagcactagaaaatatggttagaaatattttgcaagaagtaaatagtggcggagtatcaacaacaacttctcaaaaagtgagcggggatacactaactgttcgcgattatccacttggtacgaaacgtccagaacttgtaaaaacatcgacatcaaaatcattagacgatattacgttgaaaagtgttctagatggcacaatcaaaccggaagatgttcgtgtaacagcagaaacacttaaaatgcaagcacaagtagcaagagatgccggacgtgcaacactcgcgaataattttgaacgtgcagcagagctaacgattgttccagatgaacgcattttagaaatttataatgcgatgcgtccttatcgttcctcgagagaagagttgctggcgattgcagatgaattagagagcgtttatcatgctacaatttgttctaattatgttcgtgaagcagcacagctttatcaagagcgtaagaaattaaaaggtgataattaaaattcccctttgctcgcgattatgtaggaaatgcggtgaaatgaatgaagtatattgcagggattgatatcggaaattctacaacggaagtggcacttgctatggcaaactcttcgaaggaagcagcgtttgttgctagtgctattacggacacaaccggtatcaaaggaacgaaacaaaatcttcacgggatttttaaagcattgcgacttgctttagagaaagtaaatgcgacgaccgaggacttagccgaaatccgtatcaatgaagcgacaccagtgattggcgatgtggcaatggaaactattacagaaacaatcattactgagtctacgatgattggtcacaatcctaaaacaccagggggacttggtatgggttcaggtgtgacggtgctattggatgacgttacatctaaatcaaaagatgcagactacattgtgattatcccgaaaacagtcgattttgaagatgcagcaaagcaaattaatacttacgtcgaaaatggctatcaaatcacagctgcaattcttcaagcagatgacggggttctcgtgcataaccgcctaaaccataagattccgattgtcgatgaagtagggtttattgataaagtaccggtcgatatgttagcagctgttgaagttgcagctcccggaaaagtcattgaaaccatttctaatccatatggtattgcgacagtatttcatttgaattcggatgaaacgaaaaatattattcctgtggcacgagctttaattggcaatcgttcggcggttgtgattaaaacgccagaaggtgatgtcaaagctcgaacaataccagcgggacatatcgaacttcaatcaggatccagaacgcagcgtgtcaatgtcgcagaaggctctgagaaaatcatgcaagccattatgtcacttccaaaactcgacaatgctagcggagaaccaggaacaaatatcggcggcatgctagaaaaagtgcgccaaacgatggctggactaacagataaattgccagcagatatttttattcaagatttgctagctgtggatacatttgttccagtagatgttcaaggtgggcttgcaggggagttttccatggaacaagcggttggtattgcctccatggtaaaaagtgatcacttgcaaatggcagccatcgcctcagaaatcgaacaagaactgcaagtaagcgtcaaaattggtggtgcagaagcagaggctgccattctcggagcgcttactacaccaggaactaatactccacttgccattttagatttaggtgctggatccacagatgcctcgattatcaacggaaaaggagaaattatcgcaactcatttagccggcgctggcgatatggtaacgatgattatccagtcagaaattggccttgaagaccgttatttagccgaagatattaaaaaatatccgcttgctaaagtcgaaagtattttccacattcggcatgaagatggcacagtgcaattttttgatacgccgctttctccaactgtttttgccaaagtggtgattgtaaaaccagatggctttgtgccaatacctggggatgtatcgattgaaaaaatcaagttaattcgccgttcagctaaagagcgtgtctttgtaacgaataccatccgcgcattaaaatatgtcagcccaactgggaatattcgagatattccatttgttgtaattgttggaggatcagcccttgattttgagattccacaattaattaccgatgcactttctcattattcactcgttgctggccgtgggaatattcgtggtaaagaaggccctagaaatgcagttgctacaggcttaattctagctggaggtgctaaggcatgattccagttgttagtaagccagccatttattttcatgcagatgtagatgcgaatccagacagtattaaacaagttttatttggaatagaagaagaaggcattccatgtgaattagaaattatgcctttgaaagacgaagtgcaagcagcatttcgagcatctgcgagttctccgcttctagtaggggttacgctgaaaaatgatcatttagtgattcattatcgtaatttacccccagataaaccactattttcagcgcatcgtttttgcgcaagcacactagaaaaccagcgaaatatgggaatgaatgcagcgcgacttgtcaagggtgtaccttttaaataaggaggtgaaggaatgcatcaagcaattggaattattgaaattaaaggacttgcttcagcgatagccgtagcggatacaatggcaaaagtagcaaatatccaacttgtagacacggaaaaagcaaaaggttttggctggattaccgtgaaagtagaaggtgatgttgctgctgtgaacgcggcactggaagcaggtgaacaaaccgcaatagcctcagacagttttattgcgaaaaaagtcattcctcgaccaggggaagagatttttacagtattttggccgaaagaagaaatagagccagaaaagccggaagtgatggttgaaacagaaaaagttgaggaaaccgaagcgccgacagaagcgacttgtaatctatgtcatgatcctctatgcccacgggtaaaaggcgatcctagacaagattgtatccattttgaagaagagaagtaaacataatttgaggaggaaataataatgaataatgcacttggaatgattgaaactaaaggtcttgttggcgcaatcgaagcagctgacgcaatggttaaagcggcaaatgtatcacttgtagggtatgaaaaaatcggttctggacttgtaactgtcatggttcgcggtgatgtaggcgcagtaaaagcagcaacagatgcaggcgcagcagcagctcgtaacgttggcgaagtacaatctatccacgttatcccacgtccacacaatgatgtagaaacattgctacaaaaaggtttataagtcgtggaaagagaagaattaaaagcaataatcaagcaaatagtagcagataaacttagtggtgcggaaacagagattcctattggagtctctaaccgccacatacatctaacagaaacagactataaccaactttttccaaatgaacctattcaagtaaaaaaatggctcaaacaacctggcgaatttgctgccgagcaaacccttactgttgtttcagaaaagggagaactacatcgtgtccgcattttaggaccacttcggaaattttcgcaagtagagctttctaaaacggatgcaagaatgcttggtatgaagattccgattcgtgtttctggagatattgaaggtacaccaggaattaaacttgtttcgaaacatagcgaaatctgcttaccaaaaggagcgattgtcgcgaaacgccacatccatttaccagaaagtgtggcgaatgaattcggtgtgaaacaaggcgatgaagtttctgtccttgttggttcagaaatgcgaagtctcgttttaaatcactgtacgattcgggtaaataatcaatttattccagaaatgcatattgatacagatgaagcgaacgcggcagatattgctggcacgaattttgcaaaaataatcaagtcgtgatctggtaaggaggtggaaaaatggatattttacaaacagccaatgaacgaatggaacagcttgcagcgctaatgaataaagatatcgaacaaaaaattccagctggggaaaaagtgaaagttggcgtcgatttaggtacttcctcgattgtgtttgttgtgttagatgagaataatgtaccactttttggtgcatttgaatttgcagatgctgttcgcgatggcctcgttgtcaattaccgcgagtctgtagaagttgtgacacgactgaaaaaccgagcagaaaaatgcttaggaataagtttgacacatgcttcgggagccatcccaccaggtacagttggaaacaataaaaaagtggtcgcgaacgtaatcgaaagtgccggaatggaagcactttacacaatcgatgagcctacagcggccgccgcagtacttgatttgcaaaatggtgcagtcgtcgatgtcggcggtgggacaactggaattagtgtgtttgagaatggtgaagtaatttataccgcagatgaaccaacaggaggaacgcatatgacacttgttctcgctggatattacggtgtcccagtagaagaagctgaacagaataaacgcgcgcaaaaagattcgagcgagcatttttcagtcatgcgtcctgtagtggaaaaaatggcagaaattacccgtgttcatctcgagaaatctccctcagagccactttatatcgttggtggtgcttccgcgtatagccagttcaaagatacgtttgaaagctatttgaagatgcctgtttttcaaccgaattatccgcagtatgtcacaccacttggcattgctatgagttcagggagcgagaatttatgatagaaaaattagtggaaatcattgtccagcgcatgaaacttcgtgcgacaagtaaaacttctatcgctattagcaaacttccacgcgatccagttgcgatttttatggaaagcggaacggttcggttaacacaagtaaacaaacattttcttgagcgaattctcggtggaaatcgagcagaatcactaactgtttggtttgaaaaagctgcggattatggagtgacgattgaacttgaattgtacgataacggcgaaccttggctggattatacaatgcttagtcagttaaattaccccgtttttacgagtaatggtgagcgactttttcatgcaagtaatcaagtagtttgttacggtgatagcgcggtaatcccaagcggaagtacactttgcaaatataaaaagcagcttattacaccgcttgcaaatgaatatttaacgaaaaataatattgcagtgcgggaaaggcagtgacgttatgtttatggcaaaaataacaggaagtgtagtttctacaaaaaaagaagactcacttactggtaaaaaattgatgattgtacaaccggttgatgcaaatggagagcatgtgcgctcagaagaagtagcgtgtgactctgttggggcaggaattggggagtatgtgcttgttgctcgtggcaatgcagctagaagtgtttttgcggaaccaaatagtgcgattgattcggcaattatcgcaattgtcgatagttttgataagtaaggagtgaataactcgtgagtatctatacaaaaaccggcgataaagggacaacggcactatttgatgggaatcgtgtgaaaaaatacgatgaccgcgtcgaaacctatgggtcgtttgatgagctgaatgcagaaattagtgtagcagaaaaattcgtgacttcagctgagaataagtctttgcttagaaacgtggagcggcagttgttttacgtttgcgcagaacttgcaacagagcacgaagcatccctcgctagcaaaattattattacagaaaacgacatcaatcaacttgaaaaagtcattgatgattacactgcaaagttgccaaaagtcgatagttttgtccttcctggatcaagcacagccggagcgtttcttcatagcgcaaggactgttgctagacgtggtgagagattattagttcgtttgtcagaacaaacggatatccgaaaagagttattaaaattcgtaaatcgcttatcggatttcttgtacatccttgctagagaagaggattttagacaaatgctcgataaagcgaccaagctcattgttgccaaatacttagagcaaactggccaagaaaagtcagttacaagcgatttatctttttccttttgtgaaaaattaatgcaccaagtttgtattgtatcggaagaaattggcgttccagtaacacttgctatcgtcgatgcgcacggtaatgccagatttaattaccggatggagcacgctcttttagtaagtgcagaactggcaacgaaaaaagcatattcagctgtagcaatgaaaactagtacagaaaaattaacagaagcagttcagccaggagccccactttatcaattagaaacactgacaaatggtgacattgtaacctttggcgggggtgttcctatctacggaaaagatggagctattattggtggaatggggattagcggcggatcagtggaggaagatatccacattgcgaaaaaagcattatcaatgatagagaaggggtaattctgtatggaatcattagaactcgaaaaactagtgaaaaaagttctcttagaaaaattagcagaacaaaaaggtataccagtaaaaacaatgaccaaaggcgcaaaaagtggggtttttgatacagttgacgaggccgttcaagcagcagttatagcacaaaatagctataaagaaaaatcattagaagaacgccgcaacgttgtgaaagcaattcgcgaagcactttatccagaaattgaatccattgcggcgcgagcagttgctgaaacaggtatgggaaatgtggcagataaaattttgaaaaacacgttagcgattgaaaaaacgcccggcgttgaagatttgtacacagaagtcgctactggtgacaatggaatgacactttacgaactttctccatatggcgtaattggggcagtagcaccgagcacgaacccgacggagacattaatctgcaatacaatcggcatgctagcagctgggaatgcagtattttatagcccgcatccaggtgcgaaaaatatttctctttggttgattgaaaagttgaatacgattgtccgcgaaagttgtggtgttgataatttagttgttacagttgaaaaaccatccattcaagccgcgcaagaaatgatgaatcatccgaaagtaccgttgctcgttattacaggtggccctggtgtagttcttcaagccatgcaatccggtaaaaaagttattggtgcaggtgctgggaatccgccatccattgtagatgagacagcgaacatcgaaaaagcagctgctgatatcgtagacggcgcatcttttgaccataatattctatgtattgcggagaaaagtgttgttgcagttgatagcatcgcagatttcttaatgttccaaatggaaaaaaatggtgcattacatgtgaccaatccaagcgatattcaaaaactagaaaaagtagctgtcactgataaaggtgtaacaaacaaaaaattagtcggaaaaagcgcttcagaaatcttaaaagaagcaggaatagcctgtgatttttcaccgcgtttaattattgtggaaacagaaaaaacgcatccttttgcaacagtagaattattaatgccaatcgttcctgttgttagagttcctaattttgaggaagcacttgaagttgctattgagttagaacaaggcttgcatcacacagcaacgatgcattcgcaaaatatttctagattaaataaagctgcacgagacatgcaaacatccatctttgtcaaaaatggtccttcatttgcgggattaggctttagaggagaaggtagcactactttcacaattgcaacgcctaccggagaaggaaccactacagcacgacattttgctagacgtcgccgttgtgttttaacagatggtttttcgattcgttaagaggaggcaaactgaatgaatagctttcaaattaaaacaaaagtagcttttggtacgaatagtttacaagttttaaaagaaattaaaaataaaaatgtctggattatttgcgaccgttttttggctgatggagaggggcttcaaggattaatcggacaattagatgcatccaataatgtgcatattttcaccgatgtagtgcctgatccgcctatttccaaagtagctggaggggttagtgaggcaggcaaaatccaaccgcaagtcatgattgcttttggtggtggttcagcgattgatacggctaaaggaatctactatttcgccaaacgtttggaaaaaatcaatatcagtacttttattgcaattccaaccactagcggtacaggctcggaagtaacagccgcaaccgttattacagatccaacaacgaaaattaaatatccgcttttcttagatgaactaattccggatatggctattttggatgcgcagctagttgttacggtacctccagccattacggcgaacactgggatggatgtcctaacacacgctatcgaagcttatgtctctaaagatgcgagcgattataccgatgctcttggtgaaaaaagtgtgcaattaacgttacgtttcttaacgagttgttatgatgatggtcgtaatttagcggatcgggaaaaaatgcataatgcgtctactatggctggaatggcatttaactgcgccaatttaggtttgaatcacagtattgcgcatcaacttggtgcacagttccacgtaccccacgggctagccaatgcgattctactggatgcagtgattcgttttaacgcctttaaaaatcgcgaaacggaacaaaaatatgcggagatggcgcgcatttgcggcattgcttccagatctgactcgaacgaaacggcagtccgcttacttcgcgaaagaatcgtagcgatgatggaacatatgcaaatgccacggactttaacagatgctggagtagcaaaagaaaaagtctatgcaaaaatggacgaaattgcaacgaatgcactgaaagacgcttgcttaccgactagtccaacgacaccgacacatcaagagctaaaagaaattttagaacaaattatttagaatttacgttaaaaaggaggataaactatgtcagcatatttggcggaatttattgggacgatggttttaattatgtttgggaacggccttttagcaggattgacattaaataaatcattatctcaaggggcaaactgggtagttgttacatttggttggggttttgcggtaatgattgggatttatgtcgcaggagcatatagcggggcgcatttaaatccagctgtaactattgcgcttgcagttggaggatcattcccttgggcagacgtggtgccatatattatcgcgcaaatcgccggagcatttgttggagcatccatcgttattttacactactatccgcattttaaagcgacacccccagaaattgatacacatggtattttttccacaggaccagcgattagaaatacacctttcaacttaatcagtgaaattatcgcaacatttgctttcatttttggcttacttatgattggagcgaacagtttcacagatggcttaaatccattaattcttggctttctagtagttgccatcggaatgagttttggaccaacgacaggttatgcaattaacccagctcgtgatttaggaccaaggcttgcttactttttactaccggtaccaaataaaagtggatcagactggcgttacgcttggattccaattgtcggaccaatcattggtggtctcttagccattggactatttaacattttattataataaagcatggagtaaacaagaatggctttgtttactcctttaaaaatgagaaaggactgagctatatgcacaaaattatggcgataaacgcagggagttcttcactgaaattccaaatttttacgatgccaggagaagaagttttagttaagggcttaattgaaagaatcgggttaccagatgccattttcaacatgtcctttcaaaatgaaaaaatcaaagaaacacgagcaatcaatgaccacgggaaagcagtcgagattttactggagcagctgaaggcgcatcaagtaatcaatgatctgagcgaaattacaggggtcggacatcgtgttgcgcatggtggagaagattttgttacctcgtgtgttgtaacggatgaagtggtgaagggaattgaagctgtgacaaaccttgcaccactgcataatccagcgaatatcatcggtatcaaaacgttccgtgaattgctgccaaatgcggtttcggttgcagtatttgatacagcatttcatcaaacgattccacaagaaaactttttatatgcgcttccttatgagctttacgaaaaacatcatattcgaaaatacggttttcatggaacgagtcataaatatgtggctggaaaagcagcagaagttcttgagaaacctttagaaaaattaaaaattatttcttgtcatttgggtaacggagcgagtgtttgtgcgattgaagctggaaaatcagtgaacacttcgatgggctttacaccaaatgctggcttgatgatgggaacacgttctggtacaattgacgcgacaatcatcccgtatttagttgatgaattaggctatagcttggatgaagtgatgcatatgatgtctaatgaatcaggtgttcttggcgtctcgggaatttcaagcgattttagagatatcgaaatagctgctaaagaaggaaattcgcgcgcattattaacgctacgtatgtttactggccaaatatgcaactacattggtgcttatgcctccgcaatgaacggttgcgatgcattattatttacagcgggtgtgggtgaaaattccccgttaatccgccaaatggtgacagaacagctaagttatcttggtgtaacctgccatgtgacaaaaaataatgcgggtgatatgataattagcaatgataatgaagcagtcaaagtatgcattattccaaccaatgaagaactaatgattgctcgcgatgtagaaaagtatgcaaaacaaacgataggttaaggagcgatttgatgtgaagataacgacggcttctcacggcggcaactataatgaactagcaaaacaacacggattaacgaaagaaatggtgctcgatttcagtgcgaatattaatccactaggagtcccagctagtttgaaacaaacaataacagcgaatttggacaaactggtagaatatccagaaccagattacttggcgctccgtgcgcgaattgcctcgtttcatcaactcgacctagcgaatgttatccctggaaacggggcgactgagctgattttcggaatagcaaaagtaaccaaggcgcaaaaagtactcttacttgcgcctacttttgcggaatatgaacgtgctttttttgatgccgaaattgtttatgcagagttaacgaaagaaaccaattttgcggcggtggaaattgtactagaaatactcgaacgagatacggaaatcgaagctgtttgtttgtgtaaccccaataatccaaccggacaacttatcgcgcaacaagaaatgataaagattgctgatttatgtgaaaaacgaaacatatatttaattatcgatgaggcttttatggactttttagaagaaaatgagacaatttcgatgatcaacaatttagaaagatttccgcatgtagcaattattcgcgcctttacgaagtttttcgcgattccaggtctaagacttggttatttgctgacaaaaaatgacttattagccgaagcgctcatgcaaatgcgcgaaccttggtcgattaatacatttgctgacttagcagggcaaatgttattagaggacgaagcctatattagacaaacgttcgattggattaacgaggaacgagactttttgtaccgaggcttaagcagattttcagcacttaccgtgtaccgaccaactgtaaattacatatttttccacctcgaaaaaccgcttgatttacgaaaagaattgcttttaaaaggaatctttattcgaagttgcgctaattaccgaggccttaccgagaattattaccgagttgcggtgaaaagtagagccgataatagccaactcttaacagcgcttgaggtgattttcagtggaaattaaaacgaggtgtccggcttcttgtggagaacttttgcaaggttggattttaggcggagagaaactgatttcttacccaatcaactggtattccgaagtcactttatccgataaagtaggactaaatagctccgggcatacaaaagcatggcttgcattccaagtaacttgtgagtattttggtgtagcaaaaagagacctcccgcaagtatctttacaagtgaaatcgactattccggtcgcaaaaggcatggcaagttccactgctgatattgccgcaacaatcggtgccacagcaaaatggttgaacaaatccatcacagaaattgaaattgtcaagctgtgtttgaaactagaaccaaccgatagcaccattttcgagtcactaacgttatttgatcatttaaaaggggatgtaatccaaaacttcaattggattccaaagcttggtgtcgttgtgttagaaccactcaccgttttagaaacagctacttatcggcaagaaaatcaccaagcgcaattactcaaaaatgaagggcaactagcaaaagcgatggattatttccaacaagctgtcacgcaaaaatcaatccgcttacttggagaagcagcatcgattagcgcagcgtgcaaccaaactattttaccaaaaccattttggaaagaaattctagaagtgacggaaaacttggatttagtggggctaaatgtttcgcatagtggcaccgttgtcggtatactttatgaactcgaaaaaaccgatccgctcgaaattttatttgaactagaacggcgctatgtcacgactttttacagccgatattatttccgtgagtttgtcagtggtggggttcaaattatttcgtaaagcaaattcttcttgcaagcggtctattttatgctataataattttgataaacgaattcgttcatacaaacagttagatactggaagtctggtgaaagtccagcacggtcccgccactgtaaggagttagacactctaagtcaggtcttttatctaattgttttaactggttatactgcttcgaggcaaagtatgtataattcttggttccagtgtagttgtctcactggggcttttttatttgtttttaaaacaaataagcccactgtaaatggtttggtgccgagaagctgaacgagctacgttttatcaagcaccatacgcacaaagatgtgcaccgcttcgttttatggtgggcaatgatcttttcaacgacgaaaagagtgatacaaggaatgtatcttcattgcctatttacaaaaaaagatttgacatttccacgtgtttggtttttaataaagtggacaaataaaatattttacggtacaaaggcgtactgtttacttagcaaagaagctttgagttggaagagaaaatttctctactcaaagcttctttttttattttaaaaaaactaggaggtaatctcatgcaaaaagttagttttaaaacagatctttacattggccaaggagcaacagatcgtttacttgattttaaagacaaacaaatctttatcgtaacggatccatttatggttagttccggaatgattaacgcgattacagacaaaattgatcaatcgaatacatatacgatttttagcgaaattattccagacccaccgattgaaaacgtggtagcaggaatcgaagttctaaatgaatgtgatgcaaacttgatgattgcaattggtggtggctcagcgattgatgcagcgaaagcgatgaaattcttcggtcaaaaacttggtacggtgcgcgcaatgcctttcatcgttatcccgacaactagtggaactggttcagaagtaactagtttttctgttattacaaacaaagaaaaagcaatcaaatacccactaattacagatgctattttaccagatgaagcaattttagacgctgacttagtaaaatctgttccaccagcaatcacagcagatacaggtatggatgtattaacgcatgcgcttgaagcctatgtatctacaaaagcaaatgattactcggatgcaatggcagaaaaagttatccaattagttttcacatacttagaacgtgcttacaaagatggcaatgatttagaagctcgcgaaaaaatgcataatgcgtcttgtcttgcaggaatggcttttaacattacttcgcttggcttaaatcacggtattgcgcatacagctggtgcgaaatttaaaatcccgcatggccgtatgaacacattacttttaccacacgtaattagttataacgctggaattacaagtgattttggtaacaatccagataaccgagcagcagaacgttatacagcaatcgctaaattactgaaaatgccagcatcgaatacacgtcttggcgttcgcagcttaattaatgccattaaacaacttcaaaagaaactcaatatgccaactacattaacagaatgtggtattagccgcactgatttaaatgaaaatattgctcaaatcgctgaaggtgcgctaaatgacggatgcactgcaacaaatccaagaacaccgactgaaacagatgttagcgcgattcttgagaagatgttggcataaaagttatttatttcacaactggaatcaaataacctattgacatcgttttcatgctactttataatagaaccgagcacaaagacgtgtggaattataaatatagcagagcaacggggctccctcaaaaatattgcacaatatttttaaggggctctttctattttcttggagaaatttttctctagctcttttactctttcgctcaagtaaatgcttctatagaatgattttgtcctatattgtgacgagtcaatcaatagcagaagaagaggacgtgacaggaatgaatggaagaattgtaatagccgatgatgaacctattacaagaatggacatccgagacatcttagaagaagcgaactacaatgttgtaggggaagcgacagatggttttgaagcaatcgaactatgcaaaagccatcagccagatcttgttatcatggacattcaaatgccactcttagacggcttaaaagcggggaaacgaattatttcagaagggcttgctggcggaattatcttacttaccgcatttagtgaccccaaaaacacggagaaagcaaaaggatttggagcattaggttatttagtcaagccacttgatgaaaaaagtttgatcccaacagttgaaatgagtattgccaaagggcgagaaacaagaaaattagagcagcaactagaaaagctcaccaaaaagttagaagaacgcaaagtgattgaaaaagcaaaaggtgtgcttatgattgagaacaacatcacagaagaagaagcctacaacatgattcgtaatctgagcatggacaaacgctgtccgatgatggaaatcgcagaaacgattgtgatgagcgatgactaaaacgattcgagaaatgtgtttacgctacacagatttatcggagcacgatattgatgaattaattcatactgcccagtcattaagcgtatcggctatgtatcaagacgtggatgtattcattgatgtgtacaacaaactaaccagtgaagcacttgtcattcatcatacaccaccaaaaacaaccaaatcactatacaaaaacaaagtagtcggggaaacagccctaaggtctaatgagccaggtgtacttagaacattggaaacgggtatgaactccaatgacttacttgcgaaaacacaagaaaacgtattaattcgccaaaaagtttatccaattcgtaataaacagcgagttattgccgtcctaattctagaaaacgatattagcgccgaaattaaagctcattttgaaattgacaatgaagaaacggcttatcgagatgtttctaccacgctgtctgccatgagtaaactaacggattcgattactgatcaactagatgatgccattttgatttttgaccgaaacgggattttgcagcaaaagaattgcgctgcagatcagtattacgaaagacttggttatatggaagacattcaaggtatgcattatgataatttatccctcgaccagatgatgtttgacgcaatcatgtatcaaattgaaactggaaaacaaccgattcagttaaaaaaagaagtggttatcgccgggaattactttattatgaagcagatttttgtaaaagaagaggacgagcaggaatgccgttttattctcatcttgcatgacatcacggatattaaggtgaaagaagcagaaattgtttctaaatccgttgctattcgtgaaattcatcaccgtgtcaaaaataatttgcaatctgttgtttccttattgcgcattcaaggcagacgttctacaagtatggaagcacagaagattctaaatgaaagtgtcagtcgaatccttgccattgcagcaacacatgagcttttatcgaagcaaatggaagacggcattaacctttatatggtcatcgaaacagtcgcctacaatattgaaagatgttgtacggattgtccaaaagtagctgttagaatggatattgataaacgcatttatttggacagtgaccgaaccgtggcactggcgcttgtcatgaatgagctcttacaaaactcctatgatcacgcattccatccaaatgaatcaggcgaaattttactacaaataaaagaagaaaaaaatattattcacgcagaagtaacggacaacggtcatgggttcaacgttcgtaaagtgtccgaaaaaagcctaggactttccattgtcaaaagttacattaaagataaacttcgaggcaaagtaaccattgaatcgaatgaacatggaacgaaaacaatgtttgattttaaatacaattctatccatgctacaaagaagtagctatgaaaaagcgatgaagcttaaagccaagtaacgataccgttatttgtctttaagctttttcttttgctagaaaggagtgagggttttgacggaaacaattttaagtgtagggattgaccttggtacgtcgacaacacaactcattttatccgagttagaaattcaaaatatggcatcaagtttcaccgtgccgcgtattgtcatttcagataagcggattatttttagaagtgagattctgttcacaccgattcttgctgataatttgattgacgtggaggcgattcgtgattttgtaacgaaagaatatgccaatgcaggaattaaaaaagaagaaattggcatgggagcagttattatcacgggtgaaacagctcgtaaagataacgccagcaatgtattagatgcaatgagtggttttgctggggattttgttgtagcaacagcaggacctgacttagaaagcatcattgctggaaaaggagcaggtgcccatacctatgccaaagaaaataatacctctgttgtgaatttggatattggcggcggaaccacgaacttatccctgtttgatcgcggggaactcattgatactgcttgcttagatattggtggtcggttaattaaagtagaccgtgaaacaagaaaaatcacctatattgctccaaaaattcaagctttaatagaaaaacgaggttatccggttaaacttggtgaaacaacttcaccagaaaacttgcaacccgttttaggtgaaatggttgagctgcttaagaacagtgttggcctcggggcgccaaatgatttttatgaaacaatcattacgaataaaggattgaaattcttaacggagattgaatgtatctctttttccggaggcgttgcagactgcatctcaacgggtgcgctaagtgatccttttagatatggagatattgggttattgctaggaaaagcgattgcagaatctagtttaatgactgaaaaaaagtatatcgaatctgtcgaaaccatacgggcaacagtggtcggagccggttcacacacagctgaaattagcggtagtacgattacttacaccgagaaaattttcccagtaaaaaacattccaattttgaaacttgccaaacaagaagaagatgaaaatatggcagaagtcatcaaggaaaaacttagctggttcaaaatagagaatgaaatggaacatattgcacttgcaattgaaggcgaaaatagcccaagtttccagcaagtaacagaatatgcgaaagccatttgcgaaggaatgaaagaaccaatctcacttggtcatccgctaattatcattacttggcacgacatggcaaaagccctcggacaaagcattttcgggcatttaccagctggtcatccactaatttgcttggatagtgtcaaagttgataatggtgattacattgatataggaaaaccagttgctgacgggaaagtgctaccagtagtagtaaaaaccttagtctttaactgatccacataaatagctttaattttgagaggaggatttatcgaatgattttaaaaacgaatttattcggccatacataccagttcaaatccatcactgatgtgttggcaaaagcaaacgaagaaaaatcgggcgaccgtttagccggagttgctgctgaatctgcagaagaacgtgtagctgcaaaagtggtgctttctaaaatgacgcttggagatttacgtaataatccggttgtcccatatgaaacagatgaggtaacacgtattattcaagaccaagtaaatgaccgtatccatgattccatcaaaaactggacagtggaagaattacgggaatggattttagaccataaaacaacagatgctgacattaaacgtgttgcacgcggcctaacatcagaaattattgctgctgttacaaaattaatgtccaatctagatttaatttatggcgcgaaaaaaatccgtgtaatcgcacatgcgaatacaacaatcggtcttcctggaactttctccgctagactacaaccaaaccatccaactgatgatcctgatggtatccttgcttcattaatggaaggattaacttacgggattggggatgcggtaatcggacttaacccagtagatgattctactgatagcgttgttcgtttacttaataaatttgaagaattccgcagcaaatgggatgtgccaacacaaacttgtgtgcttgcacacgtgaagactcaaatggaagcaatgcgtcgcggcgctccaactggtcttgtattccaatctatcgcaggttctgaaaaaggtaatacagctttcggttttgacggagcaactattgaagaagctagacaattagcccttcaaagtggtgctgcgactggaccaaacgtaatgtactttgaaacaggacaaggttctgaactttcttctgacgcccatttcggcgtagaccaagtaacaatggaagctcgttgttatggattcgcgaagaaatttgatccattcctagtaaatacagtagttggatttattgggcctgagtatctatatgattccaaacaagtaattcgcgccggtcttgaagatcactttatggggaaattaactggtatttccatgggctgtgacgtatgttacacaaaccatatgaaagccgaccaaaacgacgtagaaaacttatcagtacttctaactgcagcaggatgtaactttatcatgggtattcctcatggtgatgacgttatgcttaactaccaaacaactggttaccacgaaacagccactttacgtgaattatttggcttaaaaccaatcaaagaatttgatcagtggatggaaaaaatgggattcagcgaaaatggtaaattaactagccgtgctggagatgcatctattttcctaaaataaggaagggaggaactaagcgatgaacgaacaagaattaaaacaaatgattgaaggcattttaacagaaatgtccggtggtaaaacaaccgatacagtagcagctgtgccaactaaatctgtagttgaaacagttgtaacagaaggtagcatcccggatattactgaagtagatatcaaaaaacaattactagtaccagaaccagctgatcgtgaaggttatttgaaaatgaaacaaatgacaccggctcgacttggtttatggcgtgctggtccacgttacaaaacagaaacaattcttcgtttccgtgcggaccatgcagtagcacaagattccgttttctcttacgtttctgaggatttagtgaaagaaatgaacttcatcccagttaacactaaatgccaagataaagatgaatacttaactcgcccagacttaggtcgtgaatttgatgatgaaatggtggaagtaattcgtgcgaatacgacgaaaaacgccaaactacaaatcgttgttggtgatggacttagctcagcggcgattgaagctaacatcaaagatatcttaccatccattaaacaaggtttgaaaatgtataatttagattttgataacattattttcgttaaacattgtcgtgtaccttctatggacaaaatcggtgaaatcactggcgctgacgtagtttgcttacttgtaggtgaacgtccaggtctagtaacagctgaatccatgagtgcatacattgcttacaaaccaacagttggtatgccagaagctcgtcgtacagttatttctaacattcatagcggcggaactccaccggttgaagcaggcgcatatattgctgaattaattcacaatatgcttgagaaaaaatgttctggtattgacttaaaataagctagttagaggaggaatcttgatgaaaaatgataaattacctgcatccgttttaagtgtcaaagttgtatctaacgtagacaatggtctatttaaacaattagacttaaaaccgcatcaaagaagccttggtattattacatctgattgtgatgatgtaacttatacagcgcttgacgaagcaacaaaagcagcagaagtagatgttgtttatgcgaaaagtatgtatgctggtgctgggaatgcttccacaaaattcgctggtgaagttatcggtattattgccggaccaagccctgcagaagtaaaaagtggtcttgctgtagcagtagatttcatcgaaaacggcgctagctttgttagtgcaaatgaagatgatagtgtcccttacttcgcgcactgtgtttcaagaacgggtacattcctttcaaaagaagcaaatgttgcagaaggtgaagcgattgcttacttaatcgcccctccacttgaagcgatgtatgctttagacgcagcgcttaaagcagcagacgtaacaatcggagctttctatggcccaccgtccgaaacaaacttcggcggagcacttttgactggtagccaatctgcatgtaaagcagcttgtgatgcgttcaaaatggcagtagaaaatgtggctgaaaatccacttcaatattaaggtggtgctaaaaaatgccaaatgaagcgcttggtttaattgaagtcactggctttcttggtgccgttgttgctgccgatacatgtttaaaagcagcgaatgtcgaactcattcaatgtgaagtcattagcggtggattaacaacagttgaattaactggtgatgtaggtgcagtaaatgcagctatcgaagcaggaaaagcggcaacagaagacttaggttgtttagtatcaagccatgttattgcaagaatgagcgaagatacaaaagcactttttgttcctcaagaagaagctaaaccacaaccaaaagaaatcaaacaagaagaaccaaaagaagttattcaaaaagtagtagaagtgaacacaaacacgaaaagtacagagaaaaaacttcgcgcaatgaaagttattgatctaaggaaacttgcttacacattagataatgtgcctatcccaaaaagcaagattaaatatgcgaacaaggataaacttgttcacgcactaaaagatatttatggaaggagtgaaaactagtggcactagaagataaagatttacgctcaatccaagaagttcgtaacctcattgaatcagctaacaaagcacaaaaagaacttgctgcaatgagccaacaacaaattgatacaattgtaaaagcgattgctgatgccggttatggtgctcgtgaaaaactcgcaaaaatggcacatgaagaaactggttttggaatttggcaagacaaagtaattaaaaacgtcttcgcttccaagcacgtctacaattacatcaaagatatgaaaaccattggtatgttaaaagaagataacgaaaagaaagtaatggaggttgcagttccactaggtgtagttgcaggattaattccttctacaaaccctacatccactgttatttacaaaacactaatttcgattaaagcaggaaatagtatcgtattttctccacatccaaacgcactaaaagcaattcttgaaacagtaagaattattagtgaagctgcagaaaaagctgggtgtccaaaaggcgctatcagctgtatgactgttccaacaatccaaggaacagatcaactgatgaaacacaaagatacagcagttatccttgcaacaggtggttctgcaatggtaaaagcggcttattcatctggtactccagcaattggagttggcccaggtaatggcccagcatttatcgaacgcagtgccaacattcctcgcgcagtgaaacatattcttgattccaaaacattcgataacggaacaatttgcgcatctgagcaatctgtcgttgttgaacgtgtgaataaagaagctgtcattgctgaatttagaaaacaaggagcacacttcttatcagatgcagaagctgttcaacttggtaaattcatcttacgtccaaatggttcaatgaatccagcaatcgtaggtaaaagcgtgcaacatatcgctaaccttgctggtctaacagttccagctgacgcaagagtacttatcgctgaagaaacaaaagttggtgctaaaatcccttattcaagagaaaaattagctccaatcttggctttctatacagcagaaacttggcaagaagcttgcgaacttagcatggatattctttatcatgaaggagctggacatactttaatcatccactctgaagataaagaaatcatccgcgaattcgcactgaaaaaaccagtttcccgtcttttagttaatacaccaggagcgcttggcggaattggcgcaacaacaaatcttgtacctgctttaacacttggttgtggggcagttggaggaagttcatcatctgataatatcggacctgaaaatcttttcaacattcgccgcatcgctacaggagttttagagttagaagatattcgtaaagaagaaaaccaagcaacatctgaacttccggttgatgcagacgcactgatccaaagtttagtagaaaaagttttagcagaattaaaataaaaaataaaacactaattggaggaattttaaaatggcaaacgcaaacgcattaggtatgatcgaaactaaaggtttagtaggagcagtagaagcagcagacgcaatggtgaaagcagctaacgtaacacttatgggtaaagaacaagttggtggcggtctagtaacagttatggttcgcggcgatgttggcgcagttaaagcagcaacagatgcaggcgcagcagcagcggaacgcgttggtgaattactatctgtacacgtaatcccacgtccacacagcgaagtagacgcaattctaccaaaaagcgctgaataagacgaatttttaacataaatcaggaaaaagcgtgagcgtaaggcaaaagggttccatcagactcgaaaattgcccgaaactttcgctttttaccagatttaagcaatacaaagcttcccaacattactaacaccaattgtaaatgggacaaaaggatgtggttctttggctattttgacagaagatgagttacgaaaagcctatttacacaccgatttaaaaacaacgaaaaaacttgatataaaaaaaggcacaattatcacaccttcagcgaagagtttcttgtctgaaaagaaaattgaccttcattatattgatgaaattgcagaaacaaaagtagtattggagccagtgaaaacagaaactactcgagcaaaattccaaacgatttatggtggagcattagatgagaagccagaacatatgacgcatttgcgtggtaatctgcttgtatttaaagaccatccacaaattgctttccgcggaaaattagatacactggaagctgaaattctggaaacccaatgttccgttgcagctgaatttaaagatcttgcggaagatttacaagaaatcctcacctttgtaagaaatattgtacgagcggaagttttaaacgagcaaatcgaatcagtgaatttgcttggaatggatgaaaaagaactgcgggaacgtagtcataatccaaaaaaatattatcaaatgacacattttatgcctgattatacgatgggtaatgctgtcattcgtttaaacaaaataagaacaatggtacgcgaaacggaattagctgcctttttagcatttaaggaagccgattattccattaaacgaccagacatcattcaagcgcttaaccgattatctagtttattctggatactaatgttccgcgtgagaacaggtgaatataaaaagtaaggaggcttattcatgaataatgagttaataacaagccttattgaagaagtcactcgccgcgctttacttgaaactggcgtagaagtagaagcatctggccgtcacgttcatttagatcgtgaaacagtcgatgcactatttggtcctgggtatgaacttactcatttccgtgacctatctcaaccgggtcaatatgtttgtaaagaaagaattagtattgttggaccaaaaagcgttattcataacgttgtaattttaggcccaattcgtaaaaaaacacaagtagaaataagctccacagatggtacggcgcttggaattaaagcaccagttcgcgaaagtggagacatagctggaacaccaggaattttacttttatccgcaaaaaacagcgttcaattatcagaaggacttattgttgcaaaacgccatattcatatgacgcctgctgatgcagaaaaacaacaagtatcccaaagtgaaattgttcaagtgaaaattaacggtgatagaccactaatttttgatgatgttgttgttcggattagccctgattttgctacatatatgcacattgattatgacgaagccaacgcatgtggttttaaaaagggaattcgaggtcaaataatcaagaaaacaaaggctaaatgagtatggaactagacgcactcataaaagctgtcaccgaggaagtcatgagacgattacaacttccagagaaaaaaatgattatcatgggacaagattcagaacacactctcagacagtgttatctaaaagaatatcaagtttcgctttatgatcgttctgaacgtgcttgtgacattttattactggaagaattggacatcgctgaattagctcgaatcagtttgtttgcaccgatgaataaaaaagaacaatttattacagaccatcttttagcagggcggcctacttggataatgaagagtggcatcaaagcgcatgcttacaaacgttccgctaaatatggtatcagacaactttttcaagaatatgaggagaaactgagccgatttggtgtcgaatttatcgaaagtccggtaaaagagaccaaagaaagtaaagtcatcaccgaacaggatgttgaaaaacttactaagaacaaaagcgaattcattttgcctaaaggaagtttcttaacaccacttgcaaaagattatttacaggaaaaccgaataagcattaaagaaagttaggaaggaagagcggcatgcaaattggaaaagttaccgggagtttatgggcaacaagaaaagacgaaaaactgaatggtttaaaactactactagtagagatttgtaccgatgaaacggaagatgtaagacattccatagtggcagctgataatgccggagcaggaaacggcgatcttgtcctcgttacaactggtagcgcagcacgagcatctactggggacaacacaatcccagtggacgcatgtatcgttggcattatcgactcggtagaacgttatggctgaacagtccttaggtattcttgaactcaggagtataagtaaaggttacgaaatggccgatgttttcttgaaagcaggcaatgtaactttatttacttttcgtcctacatgtcctggtaaatttttgattattttgcaaggtgcttccggtgaacttactagtgcaatgcaggatgcaaaagaagaagctggaaaatttcatgtttcttcttatattttgcatatggcgcacgaagaattacttgcttttctaaacaataaacaccctaaagtggaagttgacgcagtaggaattatcgaaatcagtcagttgggtgctgggctaaatgcggtcaatgaagcgctgaaaaaatcagctattcatttaaaacgaatgacgctcggtgcttcgattggtgggaaatttgtggctgtttttacaggggaagttagtgctattcaagaagggatgcggattctaattgaaaccgccgaaccaaaaaaggtgatacatcatacggtcattccttctcctgatgaacttttaaaacgctatctatagaatggaggaacacttttgagcattaatgaaattattatttatttaatggtaatctttatgattctaggagccattgacaaaattatcggcaacaaatttggcttaggtgcacaatttgaagaaggtattatggcaatgggttcgctaactttagcaatggtcggtatcattacattagcaccagttttagcaaaaattttaagcccgattgttgtaccaatttatacggcacttggggctgacccggcaatgtttgcaacaacgttacttgcgaatgacatgggtggttttgcgctagctcaagaacttgcgctaacccctgatgctggtctttttgcaggagccattttaggatccatgatgggaccaacaatcgttttcacaattccagtagcactaggaattattaaaaaagaagatcacaaatatttagcaacgggtgtattatctggtattattacgattccaattggttgtttaatcggtggacttgtagctggattctctccaatcatgattttcaaaaacttagtaccaattattcttgtagctgcccttattatgttaggcctttggttcaaaccagaaggcatgattaaaggcttcactatttttggaaaaggggtagtaatcgttgctactattgggctagttgctggagctattcaacaacttactggtttaactattattccaggaattgcgccaattggtgaaggtattgaaatcgtaggtggaatcgcactagttctggctggggcattctgtttggtcttcgtcattacgaaagttttcaacaagccacttatgaaaatgggtaaattgctaggtatgaatgaagttgcggcagctggtatggttgctacacttgcaaatagtatcccaatgttccaaatgctaaaagatatggacgaacgcggtaaaattattaacgttgcttttgcagtatctgcggcctttgttttaggtgatcatctaggatttacagctggggttgcccaagatatgattttcccaatgattgtcggaaaacttgtcggaggagtaactgccgtagctgtcggtatctatatggctaaccgaatgatgaagaaaaataaagcaaaagaacaaacggcggtgaaagataatggctgatattagtaaagaattaattgagcagctagtaaaacaagttgtcctagaaaaaatgggtcaaagttccaaacatgttgatccaagtggtattttatcggtgaaacttcccgtagtgaaagtttcagaggaagatcgactagatacaggaaatcctagcgatgttgtttatacaaaagatttagtaacactagaagaaagtaaacgtctaggttttggtctaatggaaatgaaagatacaacattcgattggttcttggattatgatgaagtagactatgttattgaaggcagactagatgttgtcattgatggccgaactgtttcagcaggaccaggagaaattattttcattcctaaaggtagccaaatcaagttttccgtaactggtgaagcaagatttatttatgttacttatccggctgattggcagtcataattgtgaaaaagttagaatgtcgcttcgattttatgtcgaacgatattctaacttttttatttaaaaaactatgcatttggcatattgctaattaatttccaatgatttataattagaaacgctaggagctttattattaaactaaactactgaggctcagcgaagaatccgcttacaagatcaggggtattgattggagataaaaaaggatgcttactaaaatagctacttatggttgttgtgcaacaagggatttgttcaataaagcatttgttagtgattggaaaaatcattttcaattagtgtcatatcaacagcattgcagtattgtttcactaatgtcaaagccaattgatatcgaactaggagaagaactgctgggagagttaagtaactttgaaaaaagtgtatttaaacaagacgtattaaaatcttttttagaaactttaaaaacaactcaaccagaatatttagtgttagattttcatgtggatacattcaatggttttattgaactcactgatggggggattatcactaatcgaatcgtccgctataagaaattggatatttttaataaaatggaagcaaggaaagttttttcgccgttagaaaatacgactgagtttagaaaacgttggatacagagttttaaccgttttatgcaatttatgaaagaaaattgccctaatacccaaattatcattaataggttagaggttgcacgaatgtattattctttagataaccaaatggaaagcatgatagaacgtagaaaaacaaaagatcaccatactgctgagacattagctaaaattgatgagtgcatagattactttgagcgttatgctatgaataattttgatttacagtcattggactttaattccgaagaatactttggtgcagaaaataatccatggggaacctgttatatgcattacaatccctattattataaaaaaaagtttaaagatttatggaatatagttgaaaatcattttcatgcaccaacaaaattagctagttttgcacctggaggccttgcgaaacaaattccattaggtgtgaccaaattatctgatatggatgaagtaggagtatattatttaacaaatgctacttacttacaaatggaggatcgaccgacaacagataatgcaggttattttttcattgtttatccgcgaaatgggaaaaatgggtatatgcaagagctgagaaaatcaacagcagctttttccattcaaatttttgtccgaattactgatggaaaagagagttctaaatggaacatggtaaatagtggctttcgaacacttacaatacctgatgtgacttctatttctgaaattacagaggctggagaatattatattactgcagaacaggttaagaaacttcaggatcatcctacaaagaaaaatggttggtttctaaccgtttctaagaaaaatcatgatagcctaaaacaattgttaacaaaaaatactcaaaatgacaatgcctttgaagaatatgttcgacttgtaaacgtggaaaaaagaacaaacttaaaatggcgtaaatatcattttgatgaagcaaacttttcgattatagttgctatacgtaactttaaaaacaaagtggtacgaagattaaaattaacaaaagcataaacaaaaaacgatttcggctctcacagctgaaatcgtttttttatttgagtgaatcacgatattcttttggggtcattttaaattcttttttgaaaactttacaaaaatagctagcacgtgagaagcctaagtttttggcaattgtatgaacagcccagtcgcttttttctagttgctcttttgcataaagcattttttgttcattaacgtaattaataaagttgatattcaactcatttttaaacagtttacttaaatagaaggggcttaaatagacgtgattagctacttcttctaaagtaatcgaacgatgaatgtttttcttaatataacgtatggcttgtttaatttctttatgttcgccgttacttttactaggagaagtagtttcctttggtggttgtttttgtttttcatgtgctgtgtaataatcgcttaaaacatcaagcacttcaactgtttcgagtgaatgaagtagggcagagtgatctggattttttttgttgaaatcttcttgaatttgttgggtaaattgactctctacttgactatccatcaaaggttgaatatttacaactttttctttctccaaagttcttccctccctgttttatttctgcactaattataccataaaatcgctttaaataacgtttaatcctgcattttaaatagaacaataaattcttttttataacaaaatattgtcatttttttaggttggaaaatagaaattgagaaatagttcacactggtggctatttttgccatataaaatagaaaaaaacagattttaaaagcttgcactattttgcttttagtgcgctgagtgaccttgtaccagtggtttaacagggatataatgaaatggaaataacgctttcatgagagggtgatcttttcaattgaaaattcaaaaattagtattatgtgcgatgttgattgcaatgtgtgtaattggcgcgaacataaaattaatgggttctgtcgcatttgacgcagctccagcttttattggaacattgctgcttggtccgatgtacggtgcagtgcttggcattttcggtcatttaacatcagctttactagcgggttttccgctcacactaccaattcatttgattgtcgctggaatgatgggcgtaacaatgatcgcttatggatttacacgccaaaaactagcagaaaagaatcaactcgttgcgattagtgtttctagtattgttgcttttgtttttaattgtccattatcattacttgcactttatccattaatgcatcaagcggtgtttgttttattcccagtgctcgcaattggttcggtttgcaacatttttgtcgcagaagtcgtttaccaagtattgccagaacgctggaaaagacgaattgccgggtactaaacaactaaataggtgaatatattaatccgggaaagaggtgaaaatcctctacaggccctagctactgtaatacggacgaaaaccaaacatatgtcactggaagcaattccgggaagactggtgagtaggatgatgttaagtcaggagaccgcttttatattcgatatccaaaaacaacttctaagggagcgagttgtcttgattaagtagattttcacgatgggaaagtttctttgtgctacaaggaaatagcttatttgcgtaaatctcaaaaagacgccaaagttctgtttggcgtctttttttatggctaaaatgaaaggtgaaaaaagatgaacaaaatcttaattgcggctgcatcaagtgggactggtaaaacgactgtcacgcttggcattatgcatgcacttaaaaaaagaggcttgcgtgttcaaccatttaaagtaggtcctgattatattgatacaaattatcatcaagcgataacaggcgttgcatccattaatttagacagctttctaattgatgatgatgctatgctcgctgctctttttgaaaaacacgggcaatcagctgatatttcggtgattgaaggtgtaatggggctgtttgatgggcttggtattgatcgtgataattcgagtacatcttttattgctaaatgcacgaaaacgcctgtaattttagtcgtggatggtaaagcaatatccacttctgcggcggcaattgtggatggatttaatcgttttgatccggaattaaccattgctggggtgattattaatcgagttgcttcagaaaaccatttttcattgataaaaggggcgattgaacgttatacggatgtacctgttttagggtatttgccgaaaaatgcggcggtggcacttccagaacgtcatctcggactagtgccaaaagaggaaatgacggaattagaaacgaaatgggaggtacttggtgatttgattgcggaacatgttgatttagataggttgttagcaattagtaagactggtgcgaagttgaccgtacacccaccagaaatacaagtaccggacttttcgggaatgcgcgttgcttatgcgctggatgctgcatttcatttttactatcaagataacttggattttattcgctcaactggagccacactgattccgtttagcccgttagaagaaagggaagttccggacgctgattttatttatatcggtggtggatttccggaggtttttgcggaacggctagcgaagaataagtcaatgcacgaatcgattttggcagcgcatgaacaaggcaagccaatatatgccgagtgtggcggattgatgtatcttggttcgagcttagaaatggaagctgaatcctatgaaatggtaggggtttttgatggggttagtaagatgacaacacggcttcggaagtttggctactgcatcgcggaacctttagaagacacactactcggcaaaaaagggacagctattcgcggtcatgaatttcatcattctgtttttgaaacgacagaaccgacacgtatgaaattgacgaaaaagcgggatggcgaaacagtcaaagaatggcacggtggttatcaaaaaggtaatacgttcgctagttacctgcatatccatttctatcaaaatcttgctatgataacgcatatgtttggagcgatagagcgatgatattgttattttatacgtcatcattcattttagattgcttattaggtgacccatatagctggccgcatcctattaaagcaatcggtaacttgattaagtggttgactattattttacgaaaaatctttcatggtaaatcactgtattttgccgggggattgttatttgttctcactgttggtatgacaggggctgtttcctggttcattctatttcttagtgccaaaattgcttactggctttacgtagctgtttttgtttacttaggctatacgacgcttgcgatgacttgccttgcgaaagaggctcggaaaattcagcggaccttggcggacggagatttggctgctgcaagagtgcaagtgggaatgattgttggtcgggatacagataagttaaccgcagaagaaattagtaaagcaacgatagagacagtggcggaaaatacagcggatggcgttatcgcaccacttttttacttattcattggtgggccggtgcttgctttgatgtataaagcggttaatacactggattcgatggtcggttataaaaacgaaaaataccgcgcaattggttttgtttccgcgaaaatggatgacattgccaattttatcccagcgagattagcttggtttttccttgtcattgcaagttttattttaaggtatgacggacgtgcttcttggcaaatcgggcttcgagatcggaaaaatcatacgagtcctaattgtgcttatcctgaaggtgcagtagcaggcgcgcttgggatcacgcttggtggaacgcatgagtacttcggcgaaacagtcgttaaaccaaccattggaagtggaactaaacccgtttcagaaaaagaaattagccaaacgattcatttgctatacatggcttcaacgatcgcttttatcatgtttgcaagtatttatctactattattttaaaggagtggcaagatgaactatattaagaatccagccaaaattgaggagaaaagctttgaaattattcaacaaattattgatgatattcgtccagattacacatttcaaaacaagttagaggaagcgataatcaaacgtgcaatacatacgacggcagattttgattacttggatagcctcgtttttcaacaagacgctattgcaaaaatcattcatgttcttcaaaataaaggaactatttttacggatacaaatatggcgcttagtggaattaataaacgacttttagatgaacttgggtgtaaatatcattgttatgtgagtgatccagagacgatggagattgccaaacagcatgggattacacgctctatggctggaattaaactcgcttctttaaaagatggaccgaaactatttgtcctcggaaatgcgccaactgcggtatataaaattatcgagatggtagaaagtggtcaattgcaagcggatgcggttgttgcagtaccggttggttttgtcggagcggctgaatgtaaggaagagattttggaaacagatatcccagccattgtcgcacgcggtagaaaaggcggtagtaatcttgctgcagcaatcattaatgcaatcttgattacgatgtaaagaaggcgacgagtaatggaagattttatttattataacggaaaaaaataccgcaaaggctatacaactggtacgtgtgcggcagctgcggctaaagcttgtgtggaaatgattctaacccaagaagaagtgagcgcggtacaagtcacaactactggcggaacgattctggaaatccccgtggcgtatcaaaagttttcgaaagacaaagccacagcagcggttcaaaaagatggtggcgatgatattgatgcgacacacggaatgtggatttttgtagatatagatttaaccgacaacgcggaagtcgtattagatggtggtgttggtatcggtcgcgctacgcaaaaaggaatttctgtggcagtgggagaagcggcgattaatccggcaccgcggaaaaatattttagcaaccgtacgcgaatcacttggcgaaaatcgtggtgcaaagatattagtctacgcaccagaaggagaagagcgcgcgaaacgaaccatgaatagcaacttagggattatcggtggaatttctattttaggaacgacgggcattgttacccctatgtcggatgaaggctggaaaaaatcattatcgatggaacttgaaatgaagcgtaatcaaggacttgaccaaattattcttgttcctggtaattacggggatgattttgttcaaaatacacttggtttttcaagtggaaatattgtttccatgagtaatttcgttggttatatgctaaaagaaacacagcgtctagctttcaaaaaagtgctaatggttggccattttggcaaattggtgaaggtttcagcaggtatttttacgacgtacagtaaagatgcagatgcgcgggcggaaattttagttgctaatttagcattgctcggtgcgccgctatcgcttttacaagcagtggagaagtgcaatacgacagaagcagcaggcgaattaattgaagaagcaggttttacacaagtatatgaagtaattgcacaaaaaattaaagcgagatcagagcggtttttgaaattcacgaaacctagtgtggaaattgatgtggttactttttcgaccgagcgtggtttacttgctgcaacgaaagatatcgatgtactccgggaggaatggcgatgattacagtagttgggattggaccaggagatacaaatttgctaataaacgaagcaagacaagctttaaactcagctgacatagtttacgggtcaacaagacaactacaagagatagcagaactgactaatgctgtgccaatgcttttacccaaaaaactagcagatttgaaaaacatcccgcatcaaagtaaaaatgtggtgattttagcttctggagatccattactatatggaattggtaactgggctatggcaaatttttcggaagatattcggattattcctggaattagtgcgattcaaatgatgtttcaccaaattaaattaccaatgaataattgttttattacgagtagccatggtaaaatgccaaacttcgacttccttttgcaacacgaaaaagttgcgatggtgacagacacgattattggcccatatgaaatagccgctgaaattttacaacgtgacttaaaaaaaatcctttttgttggagaaaatttaagttcaaaagaagaacggattcatagactgaaaccagaggaagtagcaaaaaaatacgatatgaatgtagtggtgattgtagatgaaagatgaagtatttattcgcggtaaagtaccaatgacaaaagcagaagtgcgagcggtgagtattgatttacttagcttagatgagaagtcaaaaaaattactggatgttggtgctggaactggaagcgttggccttcaagtggcgtgcaattttcccaaaatccatgttactgcgattgagcgaaacccagatgcagtggatttaatcaaacaaaatcaagcgaaatttggtctggaaaatatagcagtcatcgaagcatacgctccaatcgaattgcctgaaaaagaaacattcgatgctattttcattggtggaagtggtgggaatttaaccgatattattgactggtctttagcacatttgattccgggaggtcgtttagtacttaattttattttgcttgaaaatgctttaactgcaatgaatcatttagaaaaattaacagtgagcgaattgacaatgaaacaaatccaagtttcgagttggcataaacttggagcgggtcattattttgaaccacaaaatccaaccgtgattatcggctgcaaaaaactagaggagtgaagaaaatggcagaagtacatttcgtcggagcaggaccaggagataaagagttaatcacattaaaaggatatcaattattaaaagaggcagatgtcgttatttatgcgggatcactcgtcaatccagagttgctagagtattgtaaagccagctgcgaaatccataatagtgcgagcatgaatttaatcgaaattattgactgtatggaagcaggtgtgactgctggtaaagaagtggttcgtttgcaaacaggggacttttctatttatggttccattcgtgaacaagtcgaggaaatgaaaaagcgttcgattcccttcacttgtacaccaggtgtgagttcattccttggtgcggcaagcagttttggggttgagtatacagttcctgaagtaagtcaaagtgtaattattacccgaatggctggcagaactccagtaccatcacgcgaatcgcttcgttcatacgcggcacaccaaacttcaatggtaattttcttgtctgttcaaggtattagaaaagttgtttcagaattaatcaaaggtggctataaacctgaaacaccagcagcagttatttacaaagcgacttgggcggaagaaaagaaagtaaccggcacgttagaagatatcgcagaaaaagtgacagaagctggaattacgaaaacggcgcttattatggtcggtgatttcctcggagaagagttttattattctaagctatacgataaggatttcaaacatgagtacagataaactggcaattattgctgtcacggaacgtggtcgtgatttagcaataacgttaacaaaaacggtagcagctacgatttttgtaccagaaaagcattgcactgagcaaacgaattctttaacgccagattttggaacagcgatgcgcgaaattttcacgaaatatcaagcgttgatttgtattatggcgactggaattgcggttcggacacttgctccagtgatagaagataagctgtcagatccagcggtacttgtcatggatgaacatggcaagtttattatcagcttgctctcaggacatgttggtggagcaaatgaactaaccgaacggattgctacgataacaggtggtgcggcagttattacaaccgcaactgaccgggcaaatgtagctgccattgataatatcgccaaacaattaaatggttatttacctgattttaaagcaacaacgaaacgcatcaatggtttacttgcagcaggaaaagaagttggtttgtacatcgatgagccactagaaatagatacgcgcggttttacaatggaagaagttagcccgcaagtctacatttcaactaaatataaactacaagtggcgacacatgaacgcatccagctggtacctaagcaatttatcctcggggtcggttgcagaaaaggcgtttcagctgaaacgatagatgcagcatttacacatttttgtgaacaagaaaacatacacccgcgggcattccgtgagattcatagtattactttaaaagcggaagaaccggcaattcttcatttagcggagaaatggcatgtcccatttattgtccatccagcagaagaattacaaacagttgctggaaaatatccaacatccgcttttgttcaaaaaactgttcaagtagggaatgtcgccctatcgtcagcagatattggtagtaacggaaacgttgttacaagccgatttgctgaaaatggcgtgactttcgcagcagggaaattaactaaaaatagtgaggtggcaaaatgatttatgtaatcggaattggcccaggagataaacgattaatgactggtgaagcactgcaagcaatagaagacgcggaggtgattgttggttacgtaacgtacatcaaactcatcaaagagctaatcaaagataaagaagtagtgaaaacaggcatgcgccgcgaaatcgatcgttgccaagaagccgttgatatcgcactaacaggaaaaaaagtagcagttgtttcaagcggcgatgcaggaatttacggtatggctggtctagttttagaactcgcagaaaaaagcaacccagatttagaagtcaaagtgattccaggaattactgcaagtattggagcggcagcggttctcggtgcgccaatcatgcacgatttttgtcatattagtttaagtgacttaatgacaccgtgggaagtaattgaaaaacgtttaacccatgctgcaatggctgattttgtggtctgtttttacaatccaagaagtaaaggccgagccaatcatttggcaaacgcttttcaaaagatgatggagcataaatcgggggacacagttgttggtattgtaaaagacgtaggtcgaaaagaagaacgaaaaattattacaacgatgcagggtattgattatgaattagtggatatgacaacggtggtgattgtaggaaacaaagaaacatacgtgaaaaatggcaaaatgattacaccacgaggttactcactatgattttcgtgcttgggggaacttcggatagcttgctcattagcgactggctaacggaaacgaagcaagcatttatcctttctgtcgcaactgattacggagaaactttagcgaaacagcatgctgaaaacgtattttgcggccgattatcgaaagaagaaatgctcctaaaatggaatgctgaaaatgttcatctcgtgattgatgcgactcatccgtttgcgactattgtttctgaaacagcgatggaagcatgcaaagaagcggacattccttatattcgttttgaacgcactagtgaacaaacagataatacttatttagtagcagatatcgaggaagcttgtgcagttgcaatgaaacttgggaaacgaatctttcttacaacaggtagcaaaaatttaccggaatttgtagatggtttaaaaagtcgacatatcatcgcacgtattttaccagtgtctgatgtaattcgttcagccgaagaactgggcctcgttgccgaccaaatcattggtatgaaaggaccgttcaccaaagatgcaaaccgaacacaactagaaatgactggggcggatgtattaataactaaagagagtggaaaacaaggtggttttcaagaaaaacttacagctgccgcagaattaaatattccagttatcgtgattcgccgtaaaaaattaaattatccaatcgaaataaatcatttaaccgaactacctgaaattttaagtcaattggaggtctactaatgggaaaagttatgttaattggtgcagggcctggggatgcgcaactactgacagtgaaaggtttagctgcactacaaaaggcagatgttattgtttacgatcgcctcgtcgaaccagcgatgctccaagaacgaaaagctagttgtaaactaatttatgttggaaaagaaccacttcatcatccaattccacaagatgaaatcgaacgaattcttgtaagagaagcggcaacgaatgagcttgtcgtccgtttaaaagcaggtgatccttatgtatttggacgaggtggcgaagaaggagagacactccataaagcaggaattccgtttgaagttatccctggaatcacttcagctattggtgggctcgcctatgctggaatccctgtaacacatcgtgattttgcttcaagttttcatgtcattaccggacatttgaagaaagggcgcgatccactagattgggaagcacttgctagactggaaggtacacttgttttcttaatggggatgactaatttacctaatatctgtgcgaatttattagaacacggtcaaaagccagaaactggtgttgcaattgtacaatgggcaactcgaggcaaacaattaacagtaactggaaatttgcaaaccatcgaacaaaaagtagctgagtcgggtatttcctctccagcacttatcgttgttggcgatgtagttagcttacgaccacaactgaacttttttgaggaaatgccactttttcataccaaagtattacttccaagagcacgagcaggaaagagtatgctcgcggaacaaattcgtgatttaggcggagaagtaacaatgtacccaaatattcaagtattagatgttgcgccaacgaaaacaaaagaacaactaagcgaagtaagcgaactgcttttcacatcaaaagaagctgtagaacgattttttgattatttagccaagcttgatttagatattcgttctcttaaaaatagccatctgacggctattggaaagcaaacgaaggaagcatttagcgaaaaaggaattattccagatagttttattaaaagacggagcacggaattgattttagagcatttaccacgattacagaaaaatgtgagtaatttaattatcggaagcgtagttgatacgaccgaagttaatgttattttagctgatgtaaaagctattgaaatgatgccgttatatgatatgcgcccagtgacagaacgaccatttgatctcgaaagctttgaacaagtatgtttttcaagttcgcgttccgtccaaaatctacttgatgtactaacaatagaagaaaaggcgattttacaaacgaaaacaatcctttcgattggaaggttcacgagcgcaactttagcgtcattcggtatgaacaatttcatagaagccgaaagcgccacaccagagagcttaatcgaactaatccaaaaaacaaaattagaaggagtaccacaatgaaaaaagcgattttagtcgttagttttggcactagttatccagaaacaagagaaaaaactattgaggcctgtgaaaaaagagtggcccatgaatttccagattacaccgtatttcgcgcatttacatcgaataaaattatcaaaaaactaaaaacacgcgacaatatgcatatcaatacgccaagccaagcgttgaatcaactaaaagaattaggctataaagaagtcattattcagtcgctacatattattagtggtggtgaatttgaaaaaatcactgcccaagtagaaaaattcaagccggatttcgattccattattgtcagccaaccgttgcttgattcgatggaagattacgaaaaagcaatcgaagcgattcgccaccaaatgccacctttaaaagagcaagaagcgcttattctcatgggtcatggttcaaaacaccatgctttcagtgcttatgcgtgccttgaccatatgctgttaaacgagccaatttatctttgtgcagtagaaagttatcctggacttgaccaagtaattgaacgtttacaacaagcggatattaaaaaagcacacctaatgccgtttatgcttgtagcaggagatcatgctacgaatgatatggcttctgatgaagaaaattcttggaaaagtacactggaacaagccggcattcaaactgaatgtcatttgcaaggtctaggcgaaaatccacttatccaatcccaatttatcgaccatatccacactgcaatagagagggtgaaaacacgtggctaaattttacggcattggtacaggtcccggagatagcaagttagtcacgatggaagcagcagaaagactcggggatgtagcaattctctacacaccgcaaccaaaaaaaggcggcgaaagtttagctaagaaaatcgtcagcccttatttaaaagatacattaatcatcaaagaacgccattttccaatgagttacaacaaagaagaaaaaatgcttgcatggaaagaaatcgcggaagaaatcaaagcagatgttcaaaatggacatgatgttgggttcattacacttggagaccccatggtttacagtacgtatagctatttattggaattattaaaaggcgacattgaaacagtgacactcgcaggtatttcgtccttttcgaatattgcttccaagattgaattaccactcgtaatggatgaggaaagttttgctgtcattcctgtaacagcaggtgctgaaaaaattgaacaagcactcacattatttgacacagttgtcttaatgaaagcagcaagtaatataccgcttcttacgacattactaaaaaaactgaatttacttgatgcagcagtagtagtaagcgatgttgccatggcgacagaaaaaatcacttacagcatgagagatataaatccagaagaaaaaatgtcatactttaccacgattatcgtgaaaaaaagaagggagcaatataaatgaaaaaattatggaagtttctaccatttgttttaatcggtgttatttattttactttaacgaacccagaatccgcacacgcaatgcatattatggaggggtttttaccagttaaatgggctgtcttttggttaattgtatttattccatttcttgtgcttggtttaattcgcattcgtaaattaattgccctagacaaaaataacaaattactattagcattgtgtgcggcctttatcttcgttctttctgcacttaaaatcccgtccgttacaggttcttgttctcacccgactggggttggccttgcaacggttatgtttggtccgctcgttgttagtgtgctcggtgtcattgtcttgctttttcaagcgttactacttgcgcacggcggtattactacacttggcgcgaacgcaatgtcgatggcggttatcggtccaatggttggttttgtggtatacaaacttgctcgtaaattaaactgtaatagaagtgtatcgattttcttatgcgcgatgacagctgacttagcaacatacttaaccaccagcgttcagctcggagtcgttttcccagatccagcgtccggcatgatggcttccattctgaagttcatggcgattttctgtgtgacacaagttccaattgcgattgcagaaggattgctaacggtagtcatgtacaatcttattagcaaaaatttaccagaaaaggtggcacaattacgatgaaaaaaataaatatcaatgtcattttaattctattagttgtattgttaatggttagtccattcttcttcaataaaacgggagaatacggcggctctgacggggaagcagaggcggaaatcaccaaaatcgatccaagctatgaaccatggtttgaacctctttatgaaccaaaaagtggcgaaattgaaagcttattatttacgcttcaaggttgtatcggaacaggaattatcgcgtatgtcattggtgtaagtcgtggcaagcggaaagctgagaacgatgttaaccattgataaatatgcttatcaaaaccggtggatagctttttcgccatcagcaaaagcattattttatgtcgcaattctaatactcgcgttaactggtcctgtgctcgtccaagccatactgtttttgtgcatggtgccactgacgctctatgtcgttaaaattcattttaaacaatatttgaaatggctccttttaccattttcatttctactttttagtttactgtcgattcttatttcgatttctaaagatccaagtagttttctcgcttcgatttcgattggcagtttttatctcgggatttccgatgtgacgattacgacggcaactcaagttttttttcgaagtatcgcttgtttagcagcaacatactttttcgtcttaactgttcccgtggtacaattaacgaaagtaatgaagcggatttttatcccaaaagtacttattgaactaacgattttaatttaccgttttatctttatttttttagaagaagcgacggcgattcgaaaagcacagagccttcgcttcggttatcacggcataaaaaatagttaccggtcatttggcatgctcgtaaatactttatttaatcgtgtcatgaaaagatataatgaaatggttgtaacacttgatgtgaagctatatcaaggagaatttcatatctaggaggaagccaatttgcttaaaacagaacatatttcattccaatatgaagatggcaaacaagccttaacggatgtttcaattgatttagaaaaaggcaatattatcggcctaattggtgcgaatggctccggtaaatcgacactttttatgcagttacttggaattaacaaaccgagcgatggcaccgtttattttgaaggaaaaccactcgcgtatacgaaaaaagcattatttgctttacgaaaaaaagtgagtatcgttttccaagatccagatcaacaaatcttttattcgaatgttcgtgatgatgtagccttcgcacttagaaatttaggtgttagcgaaagtgaagtggaggcgcgagtgacgaaagtgttagacattgttggggcaaaggactttcagcataaaccagtccagtatttaagctacggtcaaaaaaaacgtgttgcaattgccggtgctcttgttcttgatacagattggttacttttagatgaaccaactgctggtcttgatccgattggcaaaaaaatcatgatggaaatcatcgaacgccttgcaagccaaggaaagaaaatacttatttccagtcatgatatcgatttaatttatgaaatttgtgattatgtctatatgttgaaggacggaagcgttttgacagacggggaaacgagcagcgttttcttagagaaaagtaatatcgaactagcgggattagtacaaccttggctcatcaaattacatcaacaagctggttatccactgttcaaaaaagaagccgattttttcgcgcatacggggaaggtgactaattaatggtaaagcaaataatgattcaaggtaccgcttctgatgccgggaaaagtgtactggttgcaggcctatgccgcctattcaaaaataaaggcaagcgagttgttccgtttaaatcacaaaatatgtccctcaattcttttataacagcaaccggagatgaaatgggacgcgcgcaagtttttcaagcagaagcggctggcgtctttccggatgtccggatgaatcccgtgttacttaaaccgaccaatgacaggcagtcgcaagtgatttttatgggtgcaattttagataatatggatgctgtgacgtaccacgatttcaaacaaacccttatcccgaaaatccaggcagtttaccagagtttagccgatgaaaatgatattattgtactagaaggtgctggaagcccagcagaaatcaacttaaatgaccgggatatcgtgaatatgggtatggcaaaaatggtcgatgccccagttgtcttagttgctgatattgacaaaggtggcgtttttgcttcgatatacggcaccattatgctgttaaatgaagaagagcgggctcgaatcaaaggtgtgattatcaataaattccgcggcgatgtagctcttttacaacccggaattgatatgattgaggaactcacaaacgtcccggttatcggtgtgattccctatgccaatctacaactggaagaagaggacagtgtttctctaaatggaaaaaattacgcgccagatagtaatgcactgcttgatatcgcgattatttgtttaccacgtatttcgaactttacagactttcatagtttggaaatccaaccggaaataagtttgcgctacatacgaaatctagctgattttggaaaacctgatttagtcatcattccaggcagtaaaaatacgctagaagacatggcatttctcgaagaatcaggactgaaaaaagctattcaaaattttgcggaaaatgccggaaaagtaatcgggatttgtggtggctaccaaatgctcggtcaaaaaatgctcgatccggatcaagtggagagtaaacaactagaaatagccggacttggtttactagataccgagaccatttttctcgaccaaaagcgcactactcaaattacaggtgtgacgcattcaggagaagctgttgaagggtacgaaatccatatgggtgagacgaagcgcggcgagagcactagtccattttgtaaaattaaagcggtgaacggaaacgaagaaacccaccaagatggcgctatctctgccaacaaaaatatcatcggcacatatattcatggtattttcgacaatgatgttttcttgggaaatctatttgacgaactactaacgcgcaaaaaccaatccatttatccgcatgaaatcattaatctgaaagaacacaaagaacaagaatacgacaaactagcggcccttttagaagcaaatattcaaatggaccaactagaaaaaatcatgaaaggagaaaaaatatgcgtatctacacaaaaaccggcgataaaggaatgacaagaattatcgggggtagcaaagtaagtaaagacaatatccgtatcgatgcatatggaactttggatgaacttaattcgctgattggctacacgataacaacacttggggctgaaccagaaattcaagccgaacttgaacaaattcaacagcaattatttgatgcaggaggggatcttgcaacagaggaaggcaaacgtgcgtataaattaacaagtgagccagttgcttggctagaagatcgaattgatatttacgccgatgaaccaccagaaatcgaaaaatttatcttgccaggcggaacgcaagcagcctcattactgcatatggcaagaaccgtaacaagaagagctgaacgagaaatcgtcggtatgttaaaaattgcttcaagtaacgaagaagtgttaaaatacgtcaaccgtttatcggattacttttttgccgttgccagagtcgtcaattaccgcgcaggtgaaacagacattttctacaaaaattccgaactcgttttccgcaataaaaagaaataataaaaaacctctccagacatcaaagccggagaggttttcctttttttaaaaacgttgaattaaaaatacaccaataagcattaataaaacaccaatcatacgataacggttaattggatgaggaataaccccgaaaaaaccaaaatgatcaataataagtgcaataatcatttgcccacaaagcgctaaaacaaccgtcattgctgagccgagtaatggtaaaagtaaaatgttagaagttacgaagagcactccaagcgcaccgccagtgaaaacccaccaaggaattcggccgacacctttcagttgaaaagtcaaacgacgctcaacgattaaacaaaccagtgtaagcaaagtcgtcccaactaaaaaggaaataaatgatgccacaaaaggagaaccgacagttagccgaagttggctattaatcgacgtttgaatcggggaaagtagtccagaaacaagtcccattgccataaatagtaataatgatttggatgatctttttgtcatgttttctcctccttttaaaagcgttgcatcaagtaaatgccgccgaacattaagataacgccaagtagacgttcgatattaatctcatgcattggtacttgaaataaaccaaagttatcaataataatcgccataatcatttgtccacaaaccgtaatcatcacaagcagtgcagagcccagacgtggtaaaagtaaaatattagctgttaagaaaataacgcctaatgttccaccgccaacccatatataccaaggatttgaggcaatcatttctgaagatattggccatgatttttgtgtaaataaacaaacgataagtaaaacagtcgtccctaccataaaagaaacccacgaagctaaaaacggtgatttcgtatatgtactaagtcgtgtattgatggccgtttgaactggtaataccatcccagctaacaaacctgatacaataaataatataatcaaaaatttccctcccttttatcacaatgagataattataaaataaaagcggggtaaaaagatagtatttaatttaaagcgaggtttttttatgaaaattcgtattatcggatctgtcggaagtggcaaaactactttagctaaaaagctttctgaatggtatcaaatcgattattttgaaacagatcgcatcgtctggaaacgagaaggaatagaggtaagacgaaccgacatcgaaaaaatagcagtattaaataagattcttcaacaagaaaactggattattgaaggcgttcatttggaagcatgggtgaacgaaagctttgatcaagcggatgtgattatctttctcaatttacctaaaaagcaaatccgctcccaacttattaagcgccaaattaaacaattactacgattagaagcagcacattaccaagtcaaattaaacatgttaaataaaatgttttattgggacgatttatttgaccaaagaacaaaaccactaattgctgaaaaaatggctcaaactccaacaaaatggctagtcgtcaccgaaaaaacagcattgcaagaaatacaaaaaaagctattgcaaattatatcgagccgtgatatattataagcatcaaatacatcgaggtgcgatatagttatgaatgaaaaattacggaaagcctatcttccaatgaccgaaaccgctttttacatattactttcgctcgtcaaaccaaggcacggttacgcgattatcgaaaacgtcgcaaagatgacagatgatcgaatcaagcttggacccgggactatttacggaagcttatctaaaatgaacaaagataatttgatccaaattattcaagaagagagtaatcggaaaatctatcaaattactgaaattggcacagacattttgcaattagaaaaagcgcgcatcgaagaattgtatagaaactcaagggaggtctaataatggagaaaaaagtcgttaagtttttcacagtggacaatatggagaaagaagaagcctatttaaatgaaatggcacaaaatggttggttctttcaaaaatataaatcttttaaataccatttcgaacaaggagagcctgcgaaatacagctatgcgattgattttaaagaaaatgaaggggatgaagaagcctacaaaacacttttcgaagatgctggctgggagactgttttcagctatccagtcttaaatggcaattggatgtatttccgcaaagccgtagctcctggagaaacagaggaagctattttcactgacgagacttctttaattcaactttacaaaaatatccgcaaacgttggaccatttttggggcgatagtaagtttgtttttatttgttgaattgctaattgtatttcaaatagaaaatcatattggaatcgctacatttattttcattattttctttatactcgtttcgctatatgggaaaatgtttttcaatctgactcgtaaaataaataatttagctaccaggaaagcttcctaatataatcaaaaaagattacgacatttatgccgtaatcttttttgatagaattaaccattatataatagaagaaagatgcgttttttgcgtgagaaaaagtattttagacgagtcattctaattttatatgactaaatgatggcaaatgttacaaaatgaagaattatctatatcattcacagattaattggctttatatcaataattcggcttaatcttataaatgttaaagatttcttaaattcactaaaatagacccctagatggattgcaattgtaatgaaagtaacgtattctagtaccatcaagggattcgtagacagaaaggcgtgacgacatctgaaatatagaaaattatccaaaaagaagaaacaaaagaggctaattggaatagcgggaattttacttctagtaattctagtgggtgtcattgcatctgttgttagacagcaatatttaattatgactgcaccagaaccggatccagcatttcattccaaagaacaaaactttttaaatgaactttcgccacgtgcacaagaaattcaagaaaagcacggtattttaacgagtattacgcttgctcaagcaattctcgaatcagactggggccaaagcggtttagcgcaaaaaggtaacaatctatttggtgttaaaggaaaatcgccacaaccaatggtgacgatgacaacgaaagaatttgttgatggtaaatggattgaaattaatgctaatttccggaaatataaagactggaatgagtcactcgattcgcatgctgaactttttttgaacggcacttcttggaataaagataaatataatggagtaattgctgcagatgattataaaaaagccgcgcaagaattacaatcagctggctatgcaactgacccagattatgcggagaaattaatcaatattatcgaaaaatatgatttagcattatacgaccgaattgaagataaaatctattatgatacaaaatcaactggctttggcaatgtgaaaaaagacgtatctggcgcaatttggacgaaaccatatggactttccggcgcgctaaaagtagaagaaattaactactataaacgagaagatttgaaacttttacgtgaagcaaagacagatagcggcacttggtatcaaattgcagtagatactgagccgattggttgggtgaaacaagaattaatcgataaaaagtagaaaataaccgaaaaagagcaaaatggcttgtcttatttataggcataaagtcctttttaagctctttttcttttttattttcattaatactgtctttgctaaagggctatataacagctacgagagtagattgtaacataagtaatgtaaaagtaatgtgtattacaaggatgttttgatagaatgaagtggttgttttaaagaacactagtttccagtttttcaaaagctggaaggataaatcaaagaaggatgtgcaataaatcattatgttacagctcgcaaagaagcatttggtgacaattggtcttggaattacaattacattatttgcagtaccaatccactcccaagctgctggtctagaggacggcctgacttccaagcaagagaagtttattaatgagattgcgccgcatgctcaaaaagtacaaaaagaacatggtattttagctagtattacgatttcgcaagcaatcctagaatccaattggggcgaaagtaaattagcaaaagatggcaataatttattcggaattaaaggttcctatcaaggtgcttctattaaattaccgaccaaagaacataatggcgttgtttgggttggaacagatgctgttttccgtgcgtacccaggttggtatgaatcaatgaatgaccacgcacttttatttgtcaaaggcccatcatggaaccctcatttatacggaggactaatcaaagaatatgactttgaaaaggcagctattgcgcttggcaaaacaggctattcatctgatccagagtatgcagcgaaattaattgaactgatcaaaaaagcaaatttaaataaatatgataccgtttatagcgaacgtgtatcagataaagcaattaaggctactggcgaagtagctgtcaaagataattgctatgtttggtctgctccgggtggcaccaaaggagcaaaaccggttgtaagcacgaccaaatatttcggtcgtcaagtttccattaatcaagaagtaaaagtgacggattctaatatttcttggtaccatatccatcaaaatggagaatccatcggttggattgaaagtacatcgattaaagacttctatcaattagaagactatgcgccaacagtagatgcattactaaaaacagatgacaataatcgtctagtgattaatatggatatcgatacatctgagctacacaaaacaaaactagtaaaggcagataccaaagagaaaactgcctttaatttacctttattgaacgttcaatccatcatctggtaataaccttgcaaaaaaagctgaatagattactcggctttttttgcgttttcaaaggatttttataaagaaactgttataatgaaaaaggagtttataaggagggttattaatatggatgaacaattaaagatgttaaaagcattaacagatgcaaaaggtattcccggtaacgaacgtgcagtgagaaacgtgttccgcgaatatatcgaaccgttagcggatagttttgaaacagatggcttaggaagtgccgtagctaaaaaagttggagcggaagatggcccaaaaattatgattgctggccatttagatgaagttggctttatggttacgcaaattgatgataaaggttttattaaatttcaaactgtaggcggctgggtttcccaagtaatgctcgcacaaaaagtaaccatcgtgacgcgttctggcgaagaaatcacaggtgttatcggttctaaaccaccacatgtgatgacagcagctgaccgtcaaaaatcattcgatattaaagatatgtttattgatgtcggtgcagtagataaagcagaagtagaaagttacggaattcgtcctggtgatatgattgtgccagcatttgattttaccgtaatgaaaaacgaaaaattcttacttgcaaaagcttgggataaccgtattggtcttgcaattgcgattgaagtacttaaaaacttacaaaaagaacaacatccaaatatcgtttacggcgttggaacggttcaagaagaagtcggtttacgtggtgccaaaacagcagcacacttcgttcaaccagatattggttttgccgttgacgttggtatcgcaggagatacaccaggcgttacagacaaagaagcaatgagcaaaatgggtgaaggaccacaaatcgttatttacgacgcatccatggtagcacatgctggtcttcgtgattttgttacagatgtagcagacgaactatccattccttaccaatttgaagcaattccaatgggcggaacagactctggttcaatccacttaactggaaacggaatcccgtcactatccattaccattgcaacacgctacattcattctcattcctcgatgctacatcgcgatgattttgaaaatgcagtgaaactaattaccgaagtagtaaaacgtttagataaagaaaaagtaacagaaattcgcttaggttgagtttcgagaaaagaggacaacttttatggaacagattcaatcagtaaaaaacgaccgtgtcaaaacatggaaaaaactacaaacgagaaaaggccgcgataaaaccggaacttatttggtggaaggcttccatttagtggaagaagcattacgtcaagatggtttagtactggagctgcttgtttcaagtggtgtttctgttccggaagagtggttaaaaggcgattatgatgtatttgaaattagtacagaaatcagccacttaattagcgaaacaatgacagagcaaggcgtttttgcagtagtcgcaacatctgaaccagatatgatgcttttatacgggaaaaaattactgctagtagatgcagttcaagatccaggtaatgtaggcacgttaattcgtacggctgatgctgctggatatgattgtgtcgtgcttggcaagggaagtgcagacctttataatcctaaagtaattcgtagtacacaaggtagtcactttcatattcctgttattcaagcagatttatttgattggattgcgaatttagaagaagagggcgttccagttattggcgcagttctcgatgaccaagcgaaatcattaaacgacatgacaaaacgtgacacgttagcgttaatggtcggaaatgaaggaaatggtatttctccggaactacaagatcgtctttctgaaaaagtatatattccaatttatggtgacagtgaatcattaaatgtcgcggttgccgctggaattctactgtatggcttaagaaaataaagaaaaagtggtggctaagttgttttgacttagtcaccacttttttagatttcttcttgtttttcaatagctacttcccgaatagcaacgcgttttaaatcggctacaacactatgcatataatcaaatgccgcaccccagtcaattccagtaaaaaagccatttgaactaccagtggagataatcgttacttctgtttctccgtgaaaattattaatcgtaacaaaaagtgccgcacgattagacgagcggaaataaaacttttcgcaagcaagtgttgcaagctctccaaaatcaaaagttctaacttcagaaaacacgatattcgatcccacttgaccagctttaattatttcgaaagtttctgcaacgtccgttttaacaatatagcgaatggatggcatatcagtacctccttctataaaactatcttatatatagtttaagacagaagaagaatttggtcaatcgggctacaacttactaaatataagcaacataatatttattagttactttctgatgatagatatggtacaataacgttagaggtgagaattatgactgatgcacatacagtatgtccaaagtttgaatcggcgttccaattactaggtaaacgctggactggacttatcatcaatgtcttactgactggtccaaaacggtttaaacaagttgccgctgagatcccacaaatgagtgatcgggtgcttgcagaacgtttgaaggaacttgaggaaatggatatttgcttaagacaagtttatccagaaactcctgtacgcattgaatatgaattaaccgaaaaagggaaagcactccaagaagtaatgcttgaagtccagtgctgggcggataaatgggtggaagtacctaattaaaaaagaaataatctctccaaccaatatggagagattattttttagcttgaatctttcctagaaccatactataatagaaactatctaaataactaaagacaatgaaagagccaagtagcatagtgagtctgtatagggagaagtggtcatagactgaaagccactttacaaacgaatttgtgaacatttcacctctggagtcgccgccgggaagcacaagtagtgtgaaggtggtccggttactaagccgttatcgaattatgagtgggaacaattttttgttcttattagggtggtaccgcgagaagtctcgtccctttgtggatagagcttttttattttgtctaaaaagaaggagtgaacggtatgttagaacagttacagacgctgaaaagtgaagcagaaacgcaaatcaacgaagcatcagacttaaaaacattaaacgacttacgggtaaaataccttggtaaaaaaggcccgatgaccgaaattatgaaacaaatggggaaactttccgcagaagaacgaccaaaaatgggttcgcttgccaatgaagtaaggacagctttaacagaagcgatttctagtaaacaacaaattttagaaacagaagcaatcaatgaaaaactaaaatcagaaaccattgacgttacattaccagggactgctccgagtattggaacaaaacacttgctaacacaagtaattgaagaaatggaagatatgttcatcgggatgggttacgaaatcgcagaagggccagaagtagaactagattactataacttcgaagcgctaaatttaccaaaagatcacccagctcgtgatatgcaagatagcttctatatcacagaaaatactttactacgtacccaaacttctcctgtacaagcaagaacaatggaaaaacatgacttctctaaaggaccaatcaaagttatctgtccagggaaggtgtaccgccgcgataatgatgatgcaactcactctcaccaatttacgcaaattgaagggctagttgttggcgaaaatatcacgtttgctgacttaaaaggaacattaactgttctcgcaaaaacgatgtttggtgaagaacgtgaaattcgtcttcgtccatccttcttcccattcacagaaccatccgttgaaatggatatctcttgctttaaatgtggtggtaaaggttgtcgcgtttgtaaaggaaccggttggattgaaattttaggaagcgggatggtacatccaaacgtccttgaaatgtctggaattgattctactcgatacagcggctttgcttttggcttagggcctgaacgagttgcgatgttgaaatatgcggtggatgatattcgccacctttatacaaatgatttacgctttacgaagcaattccaaagtacagaaacgggggaaatctaatgttagtatcatataattgggtcaaagaatttttccaagacttcccgttaacggcggaagagctaggagaagcgattacaagaacaggtattgaaatcgaaggcgtagaagaattaagcgctagtttgaaaaatgtcgtagttggtgaagtattatcatgcgaacgccaccctgatgcagaaaaattgaataaatgtctcgttcaaacagacgaagcagaaccagttcaaatcatttgtggagctccaaacgttgcagctggtcaaaaagtaatcgtagccaaagttggcgcaagacttccaggtggacttaaaatcaaacgcgcaaaactacgcggtgaagtgtcagagggaatgatttgctccctcgcagaacttggctttgaaagcaaagttgtgccaaaagcatacgcagaaggcatttatgtattacctgcgcacgtggaaacgggtgtaaatgcaatcacgttacttgggctagatgatgcgattttggatatggcaatcacaccaaaccgcgcagacgcattgagcatgaagggtgtagctcacgaggttggtgcgattattcatcaaaaaccagcacaacctaccgagcctgacgtatctgaaaaaggaaaagcagaagatttcatttctgtagaagtagaaaatccagccgaaacaccttactatgctattaaaatggtagaaaatatcgaaatcaaagaatcaccactatggcttcaaacgaaactaatgaaagccgggattcgtccacataataacgtggttgatgtcaccaactacatcaatttattatacggacaacctttgcattcctttgactatgataaaattggcagcaagaaaattgttgtacgctctgcaaaagaacaagaagagattaccacgcttgatggcgagaaaagaactttacaagctggacatacagttatcacaaatggcgtagaaccaattgctatcgctggcgttatggggggagaattttccgaagtaacagagaacacaacgactgtagcgctagaaggtgccattttcagcagctcttccatcggtaaagcatctcgcgaattatacctacgtacagaagcaagcatccgttacgacaaaggttctgacgcttggaaagtggaaaaagcacttgcgcatggcggagcgttaatcgctgaactaagtggcggaactctagtaggcggtgtcgtagaagtagataaccgtgaaaaagcagtgaataaaatcgaaacgagcctaacacgcattaaccgcattttaggaaccgcaattacgcttacggaaattgaaactatttttgatcgtttaggatttgtattagaagtaaaaaatgatgctctaatcattgaagtaccaacaagacgttgggatattactattgaagcggatattttagaagaagtagctcggatttacggttacgatgaaattccggtaacacttccggcgacaagcacaacaggaggcttatcagacagtcaaaaagctcgtcgtgtcatgcgcgcttatttagaaggagcagggcttaaccaagcattaacttactctttaacatctaaaaaagatgcaactcgtctagcactttctgatgaaaaaacagttgcattatcgatgccaatgagcgaagaacatagccatttaagaacaagtatcgttccacaattaattcgtagcgcaagttataacatcgctcgtaaaaatatggacgtggcactttatgaaatgggtaccgtattctacgcaacagaaggcgacaatttaccaattgaacaagagcacttggcaggtctaattactggaaactggcacattgcagattggcaaaaaacaccgaaaccagtagacttcttcgttttaaaaggaattgtcgaaggcttagtgaacaaattaggtatcaaatccgaacttcactggaaacaaactgaaaaagaagaactgcatccgggaagaaccgcgagccttgttttagaagggcaagaaatcggctatcttggggcgcttcatccagcagtagaagcgaactatgatttaaaagaaacgtatgtattcgaaatcaatgtggcggctttactagatgcaaccaaagaaaaagttgtgtatcatccaattccacgttacccagaaatgacacgcgacttagcattacttgtggataaagatactaaccacgcagcaatttcgcaagtaatcaaagagcacggcgggaaattacttgtcgatatcgagctatttgatattttcgaaggggagagccttggcgaaaataaaaaatcactcgcatacacattgactttcctagacagcgaaagaacactagtcgaagaagatgtacaaaaagcaaccaacaaagtagtagaagcattacaggaaaaactaaatgcaattattcgctaaataaagaagaactaagctacctggaaaacattttcagctagtttagttctttttttgttttttataaaatagtggaaatctttccttttttagtacttcacttacttaaataacacatgttataatgatggcacatgccagagaaaaaaggacgagaaaaatgacctatgtagaaatgaaagatgtatctaaatactatcaaatgggcgagaacgttgtcactgctaatgataaaatcactttcgggataaaaaagggtgaatttgttgttatagttgggccttctggggccggaaaatccacagtattaaacatacttggtggaatggatagtgcaagtgaaggcaaaattatggtagatgggcaggatattgctcaatataatgcaaaacaattaaccaaatatcggcgaaccgatgtcggttttgtattccaattttacaatttggtacctaatttgactgctaaagagaacgtagaattagctgcccaaattgcgccaaatgcactagatgcagaaactgttttaacccaagttggattaagtcacagattagacaattttccagcgcaattatctggtggggaacagcaacgtgtcgctatagcacgtgcacttgctaaagctcctaaactgttactgtgtgatgagccaaccggtgcacttgattatgataccggcaaatcagtcttaaaattattacaagaaacttgccgtaacacggggacaaccgttattgttattacccataacacggcgattacgccaattgctgatcgaattattgaaattaataatgcaaaagttcgtagcatcaaagaaaatccagaaccaatgtccatagatgatttagaatggtaggaaggagcaaccagtgaaacgttcagctttatggaaagatatctaccgcgaaatatggcgttctaagagccgctttatttccatttttatgctgattatgttgggcgttgcttttttctccggattaaaagcaactggacccgatatgcttctaacagccgacaactattttaataagtatgaattagctaattttaatgtgcaatctacttatggactagatgagacagacaaggaagcacttgaagatatatccggtgtcgcacaagtggaactcggatatacagcagatactttaatgaaagataaaaatatcgtaacgaaactattttccacatctaaaagcgataatttaaatcaatacaaggtaattagtggccgtttaccagaaaaatcaggagaaattgcgcttgataataatcaacttgttcataaaaatgtcaaaattggtgacaaagtaacttttgtgaaaagcgatggtaacaagctaactgatacacttaaaaaatccacctataaagtagtcggttttgttagctcacccgcttatatccagaaatccgaacgtggttcgagcacggtaggtaaaggaaagacagatgcttttggtgtaattccagagcaagattttaatttaccagaatacactattgccaatcttacttttgataacttagcagcaaaacaagcttttagcgacgaatatgtatccaccgaagaaaaagataagaaaagcgtcgaacaagctttaggagatcaaccagaaaaaagactaaataaaatcaagacgagtgagcaaaagaaactaaatgaggccactgcagaaatcaacaaaggaaaagcagaattaaaagcaaatgaagcaaaacttgcagatgccaaagcacaattagaagaaggtttctctaaatataatgcagctagagcaagttacgatgccaaaatcaaacaaagtgaggcagaaattgcaaatggtgaagcagaacttgccaacgccaaaaaacaactggatgctgcaaaaatacaaatcgaccaaggtgagcaagcgcttatacaagctgaaatggaattggaagaaggacgtgcggcttgggaagatgccaataatcttctaaatacagcaaatggttatttgcgagaagcgaagtcgactttagaaaatgttttaaaacaaccagatttaactgattttgagctagatcgcgcgagtttaacagattcgttccaaatgctcgcgtccgaacttgatttatcaaatgcggaccgcgaggaatatgaaaatgccatgaataatttactagatgattatgaaaatggcaatattagcgatgcagaaataagagaatctataaacgcggctcttgcgcaagttgctaacgctgaaaatgaataccaatcagctagaactgcattagatgctgaaaaacaaacaatagaacaaggcgaaaaaacattagctgccaaaaaccaagaacttcaacaagcaaaaattgcttaccaagaaggtcttaccaaatatcaagatggtcttgaaaaaatttcgctcgcaaaacaacaattagctgttggaaaacaaaccggttccttagaattacaaagcgcacttgcaaaattaaataccggacaagcagaatacgataaaaattttgctttatttaaaaaagaaaaagcgaaagcagaagccaagttaactagtgcggaaaaagatgtacaaatcggccagcaaaaattagatgcgctgaaagttccgaaatactatgtccttgatcgtaacgataatccaggttatagcgaatacaaagaaaatgcagaccgtttaacttccttatcaacagcctttccaattttcttctttctaattgccgcgctcgtttgtttaacgacaatgacgcgcatggtagaggaacaaagaacacaaattggcacattaaaagcatttggttattccaacggtagcattattttgaaatatcttgtttacgggtcgattgccagtgtcattggaagtgtccttggaattttaattggcttccagtttttcccgaacattattttcaatgcttataaatccatgtatgaaatgccatctgtagatattggattttattggagttatagcttacttgctttatttgtcgctttattctgtacaacatttacagcttatgtagcttgtcgtgctgaacttcgcgctaatgcagcaacgttaatgcgtccaaaagcgccaaaaattggtaaacgtattttccttgagcggattagttttatttggaaacgaatgaacttcacaagtaaagtgactgcaagaaatttattccgctacaaacaaagaatgctcatgacggttctaggtgttgctggatgtaccgcattaattcttactggttttgggctacggaattcaattagtgacatcgccaaaatgcaatatggccaaattatgaaatatgatgcagctatttatcaagacatgagcgcaccaccagcagccaaagaaacctttgatgaaataatgaatgattccaatatcaaaagcaaattggctatgtcacaaacaaatattgagaccgtaaaatcaggacaatcagcacaaactacatcaatcattgtccctaaaaatttgaatgaactaccaaattacattgtgcttcgcgaccgtgctagtcatacaaccgaaaaacttaccgatgatggtgcgattataacggaaaaactggctaaattattcgacgtaaaaccaggcgatacaattaccgtcaaaaacgctgaaaatgacaaattccaaataaaagtcagtgccattactgaaaactatgcaatgcactacatttacatgaccaaagcatattatcagcaagtatttaaagaaaaacctagctacaatttagacttattaatgttaaaagatacctctgaaaaagtagagagcgattttgcggaaaaattaacagatagtaaagcaattttaaatgttactttttccaataatgttagttccttgctaaatgaaacattggatagtctgaatattgttatcgtggtactcattacgtctgcggcattacttgcattcgttgtcctttacaacctgacaaacattaatgtatcagaacgtattcgagaactttccactatcaaagtacttggtttttatccaaaagaagtgactatgtatgtctaccgagaaaatattattttaaccttaatgggcattgcggctggatttatccttggtttcttcttgcaccgatttatcatcaccacagcagaagtggatcaaatgatgttcagtccggcaattagttggacaagctacttattttccggcatactcacactcgtttttgcaactgttgtgatggttgttatgcatattaaactaaaacgaatcgacatgattgaagcactgaaatcagttgaatgatgatgaaaagaacttgtttttatcggcaagttcttttcatttgacttaaaaataaataaagcttaaactaaaaaatagttaagggggtgaactttatttggaaagacaaaaagtaaagcaactgataaaaagttaccaacaaacatacatatttgcgatgaatcaaatacaccaagctatttcagaaatttcagcaagtactgtggacctttccattgagcagttttttgttctgcgcgaaattgctacctatgatggtattagcgcaacagaactagcagccactttagcggtaaataagagcgctattacacctaagctgaaaaaattagtagaaaaaggctacataagacgagaacgaaaccaactagataaacgagccgtagttttaactatctcagaaaaagggaataacgtttacgaagaatgcgaaaaacaattagagttactcgtgaatgaatggctcgaaatactaggggaaaaagacagcgaacaattttttgaattatttcaaaagattaccaagtcggttgttgagcctagacaataaaaggagagatttggcatgaaatggattatgaaactccgctgggccattttagcgttttggcttgcagcagcagtcgtactaatgtttattgcaccacccatggcagatcttgtacgcgaaaaaggcgaattaaagctgcctgatggctatccgtcatcactagcaacggaaatgcaaaagaaacataatccagatgacaagggttcagcttacattgctgtttatacagccgaccataagttaactggaacagaattaaacgatatccagaaatcactcgactctatcgaaaaagataaagacgaacttcacgtaacaaacgtgttatcaagctttaaccaaccagagcttaaagataagtttttagcaaaagatggtaaaacaatggtagcaagtttaaccgtagatgatacggatgcttcggttaaaagcatacgtaacgcactagacaaaaaaatggatgtaaaaggtgttgacacgtatttaacaggtaataaactaattcaagaagacgtagttcaagggtctgaagacggtttacataaaacagaaggcatcactgttgtctttattttagtcgtattattccttgtattccgctcagcagtggcaccgtttattccacttataacagtaggaattagttacctcgttgcgcaaagtactgtagcattcttaattgatatctttaatttcccagtctctacgtacacgcaaatctttatggtttgtattatgttcggaattgggaccgactattgtattctcttaatgagtcgatttaaagaagaaatgggagccggtctcaacccacgagaagctgttcatgcaacgtatcgtacagctggaaaaacagtcatctatagtggtgtagctgttctagtagcatttacttcactttattttgttcaatttgatttatatcgttctgcagtggcagtcggcgttggaattgtcgttttactagctgcactttacacgctcgtaccattctttatgagtacgctcggaacccatttattctggccattaaataaaaatattagccataaagaaaataaaatttggggcgccgctggtaaatttacttttgcaagaccgtggattgctttattaatcgttgcagctatcacgttgccgccaatcttactgcatacaggaacagaatcattcaactcactagacgaaattagtgacaaatatccttccaaaaaaggttttgaaatcgtatcggatagttttggagcagggcaagttgcgccaacacaaatctttattgaaaatgacgataatatgcgtacaacagattacatcgctcaaattgaaaaaatttccgatgatttatctcatttaaaaggcatcgatatggtcatgagtgcttcacgtccagccggaaaacgagtagatgatatttacattaaaaaccaagctggacaagtaaacgacggcgtaggtcaagcgactgatggcgtaggagaagtgaaaaaaggtttagattcagcaagttcagaactcaaaaaatcagagccggcccttgataaagccgttgcaggagttggtgacttacaaaaaggcactgtcgcaacacaagaaggaattaaccaattacaaacagcccttgcacaaattcaaaaaggcattgaaagcggagcaactggagctggcgacttaaaacaaggtgtagcagaagccaaatcacaactagctacgttacaaaatggagaagcgcaaatccaagctggatacgctgagattcagaaaaacttacaaaatgtagctgaccaactaaaaggttttgaaaacccaagctctcaagcaattgatacttccaaactagaagagcaattcaaaaaaatcggtgcctctttccaagcattcgcagcagcgcatccagaagtgagaaatgaccctcgtttccaaaaactagccgcagatattcaaggcttagaaacagctggaaacgaactgaaaacctctgctggacagcaaatggcagcacttcaagcaaaaatgaaagaactaaatcaaggtatccaacaactcgcaacagcgatgaatcaattaaacgagcagtccaaacaaatttcggatggacttagcgcttttagtacaggccttggtcaaatcgaaacaggactagatcaattagaaaaaggccttaaccaagcagcagttgggcaagggcaagtagtttccaaaatgccggaagtctctaatgctctaacgcaaatcgctgctggacaaggtgccttaaaagacggatttgcaggcattagcggtcaaatgggtcaattaacagatggtttaacttcaggtgcagatggattaggcaaagtagaaagtgggctaaacacagcgaacggactaattgatgattggtcaaaagttccttacgcaagttccggaatttatgtaccggatgcgctactaaaaaatgctgatttccaaaaagtattagatcaatacatctcatctgatggaaaactggcaactattaacgtgattttgactaaaaatccatactctaatgaagcgatggattcgattgatgacattaatgaccaacttgcagccagtatgaaagggaccaaactggaaaatgcgaaaataggtattggtggaatgacgagtgccaattatgatacgagagatatgtcaacagctgactatcatttggttcttgtgatcgttctagcgagtgttttcgtaacactagtcattgtcctacgttccctagtaatgccgatttatctgattgcatcactcgtattgacgtactttgctgcacttggatttgcagaaattatcttcatgcgaattctaggatacagtggtctaacgtgggcaacaccgttcttcggatttgtagtgctcgtcgcgctcggtatcgattattcgatattcttgatgtcgagatttaacgaatacaacggactttctgtacgcgatagaatgataaaagccatgaaaaatatgggtggtgttattttctcagccgtcattattctcgggggaacattcgccgcaatgatgccagctggcgtactttccttacttgaaatagcgactgtcgttctaatcggcttagtactttacgccgtagtaattctaccgctcttcgttcccgtaatggttaaactattcggacgaggcaattggtggccatttatcacaagaaaaggcgaccatcaagaaaacgtaccaccgaaaaaataacacaataaaccgcattcctttataaagggagtgcggtttttagtttgatttcaaaaaataatttgctaagataaatgtatatagatgaatgaaggaggaaggaactatgataaaactcggaaatgactgggatgagttactaaaaaatgagtttaaccaaccgtattatttaacccttcgccagttcctaaaaaaagaataccaaacgaaaaaagtttttccggacatgtacgatattttcaatgcattaaagcataccgcctataaagatgtcaaagtggtaattctcggacaagacccatatcatggaccaggtcaagcacacgggctctcattttccgttcaacaaggagtacagattccaccatcactgcaaaatatttatttagaattacataacgacttaaattgtgagattccaaataatggttatttgataccgtgggcagatcaaggagtgctactattaaatacggttctaactgtacgcgctggtcaagctaactcacaccgaggacaaggctgggaaatactaacgaaccacattattgaaatcattaatcaaaaagaagaaccagtagtttttttactatggggaagcaatgcgaaagaaaagttgcaattattaacaaacccgaaacatactgcgtttacatccgttcatcctagcccgctttcagcatcgcgcggttttatgggatgcaaacatttttctaagacgaatcaattcttagaacaaaatggtgtaaaaccaattgattggcaaattccttctatataaataaaaacatctcgccattcattgacgagatgtttttttactttttaaccatttttaatgctttctctgtattagcgaaatgctgttttgtatatttcgctaatgtttccagcccaaatcgttcgatgatttccgctgcaacagcatccacatgaggtcctgcgccttttggaagtgggatgccaacttcttttgacatcgcatcaaaagcttgcacaaacttataacgagcaataatcgaagcagcagctacggaaagatgtaacccttctgcttttgtcgcaaaaaatacatcttctcgaataatgcttggttcttttgctaaataacgataatacgtatttttttcagcaaattgatcaattaaaatcgcttctggtttaattggagcaagctttttcaagacgttttcaattgcgcgattatgtaataaggctttcatttgtccttggttcatgcctcttttttggagttcgttgtatttaggattagggcaaagtagcacactatgtggaacaagtggcatgattttctcggcaatgcgacaaatttctggatctttcatcgctttagaatcttttacacctagctcttttaaaagtggcatcatttccgcgtccacgtatgcggcacaaaccgtaatcgggccaaaaaaatcgccagtgccaacttcatctgaaccaatgacattttttgatgcgaagtttgccggaagaatccctttagagacggagggcgcttttgctttggattctggaagagtcgctacccatttttttgcttctgcttctccgtttactccttggaacatcactttgcgcgatttgtagccagtgatggaaacaccaggtttttttgcagcgaaaacagctcctggtggtagctttggattagaaaaagggagatatgtttgtttcattttttcaagtgttggttgatcaactaagataactgtatttgcgataaggcatcatcctttcaaagttctattgtaacatactacgacgaaagactgaatatcggctaaacgggtggttgactcttttctttcctgctttttcgtgataagattatgacaagtagcggcctaaacgaatttgggcgaggaggaatttacgtggcaaatgagagaaataaagtagtgacaacaatttacggtagagaatatacgattgttggcgtagaaacaacagaccacttacgaaaagtagctcgcgaggtcgatgaaaaaatgcacgaaatcggctcccaaaatcacgcactagatagtggtaggctcgctgtactaacggctgtaaatgcgacacatgattacttaaaactagaacaaaaatatctagagttagagcaagaactggctcgaattaaaggaagagattaatgattttaaatgcgattattttaattttacttgtttgcggcttttttgcaggatttagaacaggccttatcaaacaacttatcttattattaggttatattttggcattttttatctcgtatacgtattacgaagatttagcgccacatttaacttttataccttatccaggtagtgatactgcagatggattatctattattttacaagaattacgaacagaaacggcttattataacgtacttggatttgcgattatttttattgtcgcaatcattgtcgttcacatgcttgcatcacttgttggtggcttgactaagattccagtcctgcgccaaattaatggattgttagcagctgtttttggtgttattaagtcctacttaattatttttgttgtcttgttcatcatggcaatttacccggcgaattggtctgaaaatctcatcgatagctcgacggttgcccagtggatgcttgaaaacacgccaattttgtccgaacaattttatgactggatgacagacattctaccaaaataaaagaaacattcgataccagatgtatactcttagccaattttggataggatttctctggtattttttaatgattttatagggagggattaaagatggctactaataaaaaagaaattattcgtttactcgaagaaattgccacttatatggaattaaaaggagaaaatagttttaaaatatctgcgttccgcaaagctgcgcaggcaattgaattagatagcagaagtctatctgaaattgatgattttacgaagattagcggtatcggaaaaactacgggtgaaattatccaacgttatttagatagtggagaatgtccagaacttgaggagctaaaaaaagaagtcccagcaggtctcgttccacttttagatgtgccagggcttggtggtaagaaattatcgcgtctttatcatgagcttggtgtggtggataaagatacattgctccaagaagcagaaaatggtcatatcgaagcattgaaaggttttggtaaaaagtctgctgaaaaaatggccgaagcagtgcgtgaaatgggtgagcgtcctgatagatacccactaaatgatgtcttaccaatcattcaaaaagtagaagcctatcttgctgaaatcgcaccaatcgaaactttcgcgcaagccggcagtttacgtagattacgggaaacggtcaaagatttagattatgttattgcgacggaaaaaccagaagatgtacaaaaagctttacttgcatttccattaattacggacgttattggagctggtgaaacaaaagtatcagctgtattagaagataacattactatctcagtggatttccgcttagtagaaaagaaagctttcgcaacaacacttcatcatttcactggttctaaagatcataatatcaaaatgcgccaattagctaaacagtcaaatgaaaaaataagcgaatatggtgtggaacaagaagatggaactgttcgccattttgaatcggaaaaaacatttttcgagcattttaagataccgtttctcccacctgaagttcgccgagatggcacagaaattgagcgcgtaacgaaggacacaaaattccttgagttaagtgatatccgcggggacttgcacatgcatacaacttggtctgacggggcgtacgcgattcctgagatgatcgaagcttgtatcgcaaaaggatacgaatacatggttattacagatcacgggaaatttttgcgagtagctaatggtctggacgaaaaaagattattggagcagcaagcagaaattaaaaaaatagctgctaaatatccagaaattgatgtctattccggcgttgaaatggatatattggctgatggatcacttgattttgatgatgagactttgaaacagctagattttgttatcgcatctatccattccagtttccaacaatcagaggaagaaattatgaagcgattaaaaacagcctgtgaaaatccatatgtgcgtctgattgcacatccaacgggtagaattgtggtgaaaagaaagccgtatcatgttaatatgaaagaactgatccaattagctaaaagtacaggaactgccttagaattaaatgccaatccgcagcgtcttgatttaaaccgcgagcatttagaaatggctcacgctgctggggtgccgattgcgattaacacagatgcgcacgacacgaaacaccttgatttcatgtctattggcgttcgagctgccacaaaagcctggctcggcaaatcagcaatcctgaatacgaaaactgcagctgaatttaaacaatttttacagaataaataacttttaaaaagaaggatgactaatggaaaaaaaagtagaagccattttagaatttgataaaataaaaaaacaactcaccgaatttgcttcttcgtcactaggggagcaagccattttagaactcgctccagcaactgattttcaagtagttcaaaaaacgcaacttgaaacagaagaaggagccaagattattcgtttacggggaagtgcgccaattactggtctaacagatgtttttgcacatttgaaacgtttagagattggtggcgatttaaacgggctagaaatttaccaaataggtagtaacttgcgcgttagccgtcaaatgaagaattttatgaacgatttactggaaatcggtgtcgaattgcctatactcggggccctttcggatgaacttttagtactaaaagaagtagaagaggatattgcgatttcagtagatgaaagcgggaaagtgttagatactgcgagtgaagcgcttagtacgattcgccgaacactccgacgtaccgaagaccgcgtacgtgaaaaactagaatcttatttgcgcgatcgtaatgcctctaaaatgttaagcgatgcggttattacaattcgaaatgatcgttatgttatcccagttaaacaagaatacaaaggtcattatggtggtatcgttcatgaccagtctgcttccggtcaaacacttttcattgagccgcaaagtgtagtggatttaaataacgaacgaaaagcacttcaagcaaaggaaaaacaagaaatagaacgcattcttgctgaaatttctgcttctttagctgcttggattaatgaaattcatcataatacattcatattagggcgctttgattttattttcgcaaaagcacgtttcgggaaagcgatgaaagccgtaacaccgcatttgagtgatgctggtgtcgtgcatttaattgcggcacgacatccgctgttagatgctgcaaaagttgtggcgaatgacatttatttaggggaagatttcactaccatcgttattactggtccaaacacaggtggtaaaacaattactctaaaaacgttgggattactgacgctcatggcgcaatccggactgcaaatcccagctcaagaagattctactattgctgtttttgagcatgtatttgccgatattggagacgaacaatccatcgaacaaagtttaagtacgttctcgtctcacatgacgaatattgtttccattttggaaaaggtaaatcagaaatcacttattttatatgatgaacttggggcaggaactgatccgcaagaaggagcggctctggccattgcaatacttgatgcgagtcacgaaaaaggcgcaagtgttgttgcaacgactcattatcctgaattaaaagcatatggttacaaccgtgttcatgcaaccaatgcatctgttgagtttaatgtcgaaacacttagtccaacttacaaattattaattggtgtacccggtcgaagtaatgcttttgatatttcacgccgcttaggattaagcgaaaatattatcacagaagcaaggagccttgttgatactgaaagcgctgatttaaatgatatgatttctagtctagaagaaaaacgaaatctagcagaaaccgaatatgaagaagcgcgcgaattagctcgcggggctgataaccttttaaaagatttacaaaaagaaatcactaattattatcaacaaaaagataaattaatcgaacaagcgagtgaaaaagcggcaactattgtggaaaaagccgaagctgaggccgaagaaataatccgcgaattacgcaccatgcaattaaacggagcggcaggaatcaaagaacatgaacttatcgatgccaaaacaagacttgggaatgctaaaccaaaaacaatcaacaaaaccattccacaagcaccaaaacaaaagccacacgtattccaagaaggagacaatgttcgcgtcctctcacttggccaaaaaggcacacttttaaacaaaattagcgataaagaatggaacgtccaaataggcataatcaaaatgaaaatcaaaaccgctgacttagaatatattcaaccagaaaaaccaaaaaaacaacgaatcattacatcggttcatagtagtggttctccagctaaaagcgaactcgatttgcgcggcgaacgttacgaagatgctttgcaaaaagtcgacaaatacttggatgaagcactgctcgcaggatatcctcaagttgccattattcacggtaaaggaactggtgcccttagaactggcgtcacagagtatctgaaaaatcatcgcatggtcaaatcgattcgtttcggtgcagcagcagaaggcgggaacggcgtaaccatcgttgagttcaagtaaacaagtgagcaaaaacatggctccaaataggtctaggtgctatactgtgtgtacaaaagtcataaggagtgaattaaatcatggtaaaagaaattacagatgcaacatttgaacaagaaactagcgaaggcttagtattaacagatttctgggcaacatggtgtggtccttgccgcatggtggctccagttttagaagaaatacaagaagaacgcggcgaagcacttaaaatcgtcaaaatggacgtagatgaaaacccagaaacacctggaagctttggtgtgatgagtattccgacacttcttatcaaaaaggacggcgaagtagtagaaacaattatcggctaccgtccaaaagaagaactggatgaagtcatcaacaaatacgtttaaaattatgctaaaatgaaagaagcttagaacaaacattctaggcttctttttaaatgtgtaactggagttgataaaatgtcttctgaacatatccaaaataaactagcgcttctgccagaccaacctggttgttatttgatgaaagatagacaaggaaccatcatttatgttgggaaagcaaaaattttaaaaaatcgtgttcgctcttatttttcgggaacgcacgacagtaaaacgcaacgtttagtccaagaaattgtggactttgaatatatagtaacatcatctaacgtagaagcattgctactagaaattaatttaataaaaaaacacgacccacgttttaacattcgcctaaaagatgataaaacttatccgtttattaaaatcacgaacgaacgacatccacgactgattattacccgccaagtaaaaaaagacaaagggaaatatttcggcccgtatccaaatgtctacgctgccaatgaagtaaaacgtattttagatcgtctgtatccattgcgtaaatgcagtacgttaccaaataaagtgtgtttgtactatcacctcggacaatgccttgccccgtgtgtatttgacgtggaagcaagtaagtataaagaaatgcaagacgagatagtcgcattcctaaatggcggctataaaaccgtcaaaaatgatttaatgaaaaaaatgcaagaagcagctgaaaatatggaatttgaaaaagcaggggaatttcgcgaccaaatcaacgcaatcgaaacaacgatggaaaaacaaaaaatgacgatgaatgatttcgttgaccgtgatgtctttggttatgcaattgataaaggctggatgtgcgtccaagtattcttcattcgtcaagggaaactgattgagcgcgatgtttcccagtttccattttataatgatgccgacgaagatttcctcactttcattggtcaattttaccaaaaagctaaccatattccaccacaagaaatatatttaccaaatgatgtcgatagcgaggcggtgcaagcagtcgttcccgatacgaaaatcattgttccacaacgcggaaataaaaaagatctcgtaaaactagcttataaaaatgccaaaattgctctaaacgaaaaattcatgctacttgaacgcaatgaagaacgcacagtcggagcagtagaacgacttggtgaagcaatgggaatcccaactccatcacgtgtggaagccttcgataactccaatattcacggtacagacccagtttccgcgatggtcacattcctcgatggcaaaccaagtaaaaatgattaccgtaaatacaaaatcaaaaccgtagaaggacctgatgattacgcaacgatgcgcgaagttatccgccgccgttactggcgagtgcttaaagaagggctaccaatgcctgatttaatcttaattgatggtggtaaaggacaaattgacagtgccaaagatgtcctaacgaatgagctaggcttagatattccagtagcaggacttgcaaaagacgacaaacaccgcactagtcaactattatttggggatccattagaaattgttccactcgaaagaaacagccaagaattctatttgctacagcgcatgcaagatgaagtccatcgttttgccattacattccaccgtcaactccgtagcaaaactggcttccaatccattcttgacggcatcccaggagtaggacccggtcgcaagaaaaaattgcttaaacacttcggctccatgaaaaaattaaaagaagcatctatagaagaaattaaagaagccggtgtccctttgaatgttgctgaggaagtgcataaacacatcacagcattcaatgaaaaagcaaaaaataccgagcaaaaatgattttccacacgattatagacgccaatgactttgatgttattggcgttttattgcgtaaaaattgttaatatatgaactaacacgtcagataaaatggcttttatatataataaacttcccttcaatacataaatgcgctaaaatataaacattgatgaaaagaacttacaaggcaggagggaacgagattgggactagtcgtattaaaatttggtggaacatctgtgagcacggtggataaaatcgggaaaacagcagatcaagccatttatgaaaaaaaacaaggaaataaagtcatcgtcgtcgtttccgcaatggggaaatcaaccgacaaattagtcgcaatggcggaagaaattagcgaggcaccagataaacgcgaaatggatatgctactttctaccggtgaacaaatcacaattgctttacttgcgatgacattaaaagaaaaagggcacgatgctatttcctatactggatggcaagcgggaattgaaacagaagccgtacatagtaatgcgagaattgccgatattgatagtgctcgtattgaatctgcgcttgatgcgggacaaattgttgttgttgcaggttttcaaggtttcacaacagatggtgaaattactacattaggacgaggtggatcagacacaaccgccgtcgccatcgcctcagctctaaacgccgaaaaatgcgcgatttgtacggatgtagtcggtgtatttacaacagatccacgctacgtgaaaaaagcccaaaaactggagcaaatcacctatgatgaaatgctagaattagctaatctcggtgccggcgttttacatccacgctccgttgaatatgccaaaaatttccgaattccgcttgaagtcagagcgagtcacgaacaagtaccaggaacaatgatcgaggaggatttaacaatggaaaataccaaagtagtccgtggaattgcttttgaagaccaaatcacccgtgtaactatccactggaaacaaaaagaagcaatgcgagtttctaaagtctttacaaaattagcagaaaataatattgatgtagatattattatccaaggaattactggactaggtcacggtaatctatccttcactatcaaaacaagtgcactgttagccacactagcagttttagaagaaagcaaagaattacttcaaatcgaaaagctagagtccgagcaagaattagcgaaagtatctatagttggctctggaatggtaagtaatccaggtgtagctgcacaaatgtttgaagctttaacagaaaataatattccaataaaaatgattagcacatccgaaatcaaagtttctactgtcgtaccagctcgtaaaatggtcgaagcagcccaagttttacacgaccaatttgaactcgataaataaaaataagcttgcagcatcaaagtaaatttctctttgttactgcaagcttattgttttagtagcgttcttcgttatcaatcgtttctttacgatcccatttaacgataatggttacttgttttttacgtttatcaatttcatcatagctttctgtatacagctttttctgtgattgcaattgttctgcgataaagccagcttctagtttaaatgtaggttcttcttgtgtacggaaacgagcagctactgtttcaccttctaaaagtaaacgcatttcatctttcttttctttcaaaatgctaaaattaccccaagaggcttcttcaaaaaattctgctacttcttctagagaatcgagtggaaatttgcgtgccaagtctttccccgcccagtacataatgtgaggtgcctcatctccaagtaattcaggaattaaataatctcgtagtaaatctaaaccaaagcttggaacgagagctttttcctcgtgtttattctgttcattttctgtcatttcggataccccactttcatacaccattataaccaaaattaccctaaaatggaaagcacaataaataaatttccacaaaaaaccttttttctcaaaaaagacttgcgaaaaagccgaaaaaataagaaaatggaaggtatagataaaaaaattggaaattaataaagaaattgaggcgagactgtgaaacaagctattggctttattgattcgggagtaggcggtttgacagtagtgcgagaagtgctaaaacagctaccccatgaacaagtatattatttaggtgataccgcacgctgcccttatggaccacgcgacaaagaagaagtagctaagtttacttgggaaatgactaattttctcgtagaccgtggcatcaaaatgctcgttattgcatgtaatacagcaacagcagcagcattatatgatattcgtgaaaaattggatattcctgtgattggtgtaatccaaccaggttcaagagcagcactcaaggcaacaagaaacaacaaaattggcgtattaggcacacttggaacagtagaaagtatggcttatccaaccgcgctcaaaggacttaaccgccgagtagaagtagattcgctcgcgtgtcccaaatttgtatctgtcgtagaatcaggtgaatacaaaagcgccattgctaaaaaagtagtagccgaatctctcttaccactgaaaagtaccaagattgatacggtgattttgggttgtacacattatccacttttaaaaccaattattgagaattttatgggagacggcgttgctgttattaactccggagaagaaactgctagtgaagttagcgcgttactggattaccataatttattagatgctacagacgaagaaattgagcaccgctttttcactacgggctcgacacaaatttttaaagatattgcaaaagactggttaaatatgccagatatgactgtagaacatattaaattaggaaaataagaggtgccaatcatgagagttgatggaagagaaagtaatgcattacgaaatattgaagtaacaccagattatttaatgcatccagaaggttctgtgctaattgcatcaggaaatacaaaagttatctgttctgcaagtgtagaaacaaaagttccaccatttatgcgaggtgaaggccgtggctggatttctgctgaatactcgatgttaccacgagcaacgaatacacgtaatatccgcgaatcttccaaaggtaaagtaaccggtagaacgatggaaattcaacgtttaatcggacgagcgctccgtgcagttgttgatttagatgcacttggcgagaggactatctggcttgattgcgacgttatccaagcagatggaggcacacgtacagcttctatcacgggcgcattcatcgcgatggtcatggcaatcgccaaactagacgaagctgtaccatttgctaaatttcctgtcaaagatttcctagcagcaactagcgtaggtgttttagaagaaggcggcacagtacttgaccttaactatgtagaagatagtgcagcacaagttgacatgaatattatcatgactggtagtggcgcttttgtagaacttcaaggaacaggcgaagaagctacattctcagaaacagaacttgctgaactaatcgccctaggtaaaaaaggaattagcgaactaatcgaaatccaaaaagaaacactcggagacaaagtcacagcgcggattaaaggagaataagaaatgagtaaaattattatcgccaccgcaaacaaaggaaaagcaaaagaattcgaaaaaatctttgcgaaatttaatatcgaagtagcaacccttgctgattttccagaaattggtgaaatagaagaaactggaacaacctttgccgaaaatgccgctcttaaagcagaaacggtcgctagcgtgttaaatcaaaccgtcattgctgatgattctggtttaatcgtagacgcgcttgacggagctcctggcgtctattccgcacgttatgcaggtgtcgcgcatgatgatgctaaaaataacgaaaaactacttaaaaacttagaaggcgttgaaccggacaaaagaacggctcgtttccactgtacacttgctgtagcaacaccttctgagaaaacatctttttatacaggtgaagtagagggtgttattgccgaacaactttgcggcacaaatggctttggctatgatccactatttttcttaccagaattcggtcttacaatggcagaaattccagcagagaaaaagaacgaaatcagccaccgagctaatgccattaaacaactagaaaaagatttagtagaagtagtagaaaaagtaaccaaaaagtgagaaaataagtaacagtatcacgggggaggaaacaaaatgaaattattagtagttagcgacagccactcagaacgtgactgcttaatccatcttaaagaaaaatacgaaaatacagtcgatgcgatgattcattgtggggattctgaattagaagctgacgatcctgcgattcagggatttcatactgttcgaggcaactgtgactttggcggtggctttccaaatgattgggtgggagaagtagacggctaccgtattttcaccacgcacggacatctgtataacatcaaaatgacactcatgaatttacggtatcgcgcacgtgaactaaacgcagattttgccttttttggtcactctcatgaattaggagtagacatgctagacgacaccatcattttaaacccaggaagcatttccttaccaagagggcgcatccgtgtgaaaacatacgctcttatcgattcaacaccagaaggtatccaagttcgattcatggaccgagatgacaacgaactaacagacctaacccaaaccttcccattaacgaagcgtaactaggtcaaaagacacccgaaaaagaaaaaatgcaataacttaaagaaaaccattgacaaacaagcgatttaaacataaaatggtatttggctgttgaaaagacagtgccatttgtcctgatagctcagctggatagagcaacggccttctaagccgtcggtcgggggttcgaatccctctcaggacgtaatatgaagcgccgtaaacgttgttaatacaatgtttacggcgctttttggtttttcgaagttcaaataaagtacaaaaaatttaaattccattaatctttttcattaattatatgtaattaggcttctaaagtcattactatagtgttttggcccaatcttaattttgaagaatataattctttacttttggtattagtcttatttagtagcatttgctccataaaaacaatagaaaaattaataccagttcttatataaaaatcttctcatgacgagaagatttttattttgcgattgagcatccaaaaacaggggtatcatataagtgttctaaaaaatgctaattgaagggggagttttacatgaaaaaaatgctgcctgagagtaaagtagaggcaattagaaaagaagggtttttaaatcgagctgttgaggcataccggtttttctatccaactgtgtccaatgtgtctaattttaaagcattgaatgatttagggattacagaaaatcacgatttcattattcagctcacaacgcctgatttaaatgtattgacgcaaaactctgatacaccatattgccttggaacgggaaacaccgagaatggtccagttgttatcgagttgccacaaggcgctatcgttggtgtggcagatgatattaattttaagtttattaccaatatgggattaaccggtgacgagcaagggaaaggcgctaaatatttgtacttaccacctaattatgatggggatatcccggatggctacatagtacgcaaaccttcaagctatcgtttcctcatttgtttacgagcgatggttcaccaagcaagtgattatgaaaaagcatttgaactcctgaaaaaagtaaaattctatcctttagaagaaaaagataataattcaaccagtacattccatgatttttcgcatcgaaaagcgatttcgacaccatattatgtcgaagggaaattcgactattgggaagtaatcaaatgggcgcttgataatgatgaaacagatccagaatattaccaaatgtatggcttactaaaagccattggtttagcgccaaataaagaatttaatcctgacatagataaaaaagctttattaatagaagctgccgagaaagcagacaaaatgatgtttgtgaattcctttaatacagatgatccagctgctattgtttggccaggaaagaactgggaatgggcagtctatggtgagaataatgacttctatgaaaaaacgtatttaaaccttcctgtaagagagcgttggttctatcaagcgacactcgaaacacacatgatgtttatgcataaagtcggatttggttctgtttatatgcttggggtgaaagatagagaaggaaactatctggatggtggcaaaagttatacattaaaagtgccaacaccagtgccaacgagcattttctggtcggtaacggtttatgaaatggatactcgttcggaaattgtcacagagcaatttatgcctgcacttaactccatcaaagatacgtttgaagtagatgctgacggcaatacaacactttactttgggccaaatcctcctgaagatgagtcgcttccatggattcaaaccgttccagatgccaattggttcacgtatttccgtatttatggaccaaccgaaccagcatttgacaatagctggcaactatatgattttgaagaagttaaataaacaaaaagaggcgtaacttttaatagttgcgcctctttttattaatcattaagtcctaacccgtctaaaattgttgcttcatatttctcaatgcgcgaaacacgcgttttcgattgctttggagccgcaaaataaagtaagtaagctttttgacgaccaggagtcaaggcttcaaaagctgtttgtagcgcgggcatttcttcaaatttcgcgaataattcttccgggataggcgtttcttctcttggtttaagctctacttctaacccagctttttcaacttcaatcgcattttgaatatacttctttagaatttctttttgatcaaggatttcttgtaaattcgtaaagcggatttgtctgccagcttgcacattttctgtttgctgcactaaaatgttttccggatcatggagcagtgcgcctttcataaagagtagggcgcagtagtttttaaaaccatggattaagaaaacattactgccattaatagcataacaaggtttgccccatttgagttcttcttctagttcaaaaccaatcgctatatctcttaatgttttgaattcagcttgccatttggatggtttatttagaaacgcatcgactttagggtttaattctgtttttgccataaagaattcctcttttctacgctttttcaatttaaaaataattctttggtacgtgttattttaacgcaatatgaaaggccttgcaaatttggtcgacctactaaaaatggacttaaagaaagaacccgagagttatcccagattcatttgttttcatgataaattgagcttccaaccaacaccaaacttatctgtaacctctccaaatttttccgaccagaatgttttggcaagtggcataacgacattaccaccttctgcaagctgatggaattgtttggtcaattttatttcgtcggatgtatcaataacaaacgtaatattatcgccaaatgtaagtggcatagacttaggtacgtcggaaaacatgactttaaccccgtccatgactaagctagcgttcataactaagtcctttagcgaatcttctataggtttctcacttgtttcgatttccccatatgtcatcaaatctgtacactttgttccaaaaatttcttcataaaacgcgatagcatctctggattgtgttctaaaattcaagtaaacattcaacgtcatttgaattcctcctcgatttttattcgctaaagttctattcattttggtgtttttattatagcagatactgcgtgaaagaggaaaaattaagaagataaatacttgacttggagctactccagggttataaactaaagataagatatagattcggaggaatttagatgaaaaaaacattgtatttaatgcgccacggtcaaacattatttaatcaacgtaaaaaaattcaaggtttttgcgatgcaccacttaccgatctcgggattaaccaagcaaaaatcgctggtagttactttaaagaaaacaatataacattcgatcaagcttacagttccacatcagagcgcgcatctgacacgttagagctgattacggacaaaagctatctacggttgaaaggattgaaagaatggaattttggtacttttgaaggcgagagcgaagacctaaatccaccgctcccatatggagatttttttgctacctatgggggagagcgagaagtggatttcagagatcgtttagtagcaacaatggaacatatcatgagtcaagataatcatgatactgtccttgccgtttctcacggagcagcctgtgcccaatttgccaggcattggggaaaaacaagcactatcggtaaggtaacaggactgaaaaattgttgcattttaaaatttgaatatgaaaacggtagatttactttagttaattttataaatcatgattttgataagggtacgcatatagaaagcactaaataaaaaagcactcgtcattgagtgcttttatgcttcattgaaacaaattctttattttatctaaaaaaccaccagttaactcatttgcagtatcttgcaagttttccgtaagtccacttgctttatcttgtagattttctgttaggttcgtcgcttcattctgtaagttttccgtgacgttacttgcttgttcaccaagctcagatgctttgtttgttgcctcttctgtcagtgttcctaggttctccaggggcagggactcggtaactttattcttcaaatcatctaaattcatcttttcctccttattttgggggcttagagttcattctaaaggaaggagggataaagtacaaacaattcgttccatcatttgtgaaaaaatatggtatgatgatatgaggaaatgaggactgacatgaataatttaaaattaagtgaagaaattaaaagagcgattaatgaactaggatatacagaagcaacacctgttcaaaaagcggtaattccagttgccttaacaggagaagatattgttgctaaatcacaaactggtagtgggaaaacagcagcatttgctattcccattgcagaacaggttgaatgggaagaaaataagccacaagcactaatcatcgttccaacacgagaacttgcaatgcaagtcaagacagaatgtacgaatatcggacgatttaaacgtgtcaaagctgcagcaatatatggacaatcaccatttgctaaacaaaaattagaactaagccaaaaaaatcatatagtcgttgggacccctggtcgcctacttgaccatattgaaaaaggatcactgaatgtcgacaaggttgcccatttagttttagatgaagtagatgaaatgttaagcatgggatttattgatcaagtggaagatatccttagccgcttaccaaaacagcgccaaaatctatttttctctgcaactatgccagaagaaatgcaagatttgatcaaacgttaccaagataatccaatggttatcgaaatggcatcagaaaaaacaaatcctatcttccacgtggagatgcaaacagataataaagaaaaaacgttaaaagatgttttaattacggaaaacccggatagtgcgattattttttgcaatacgaaaaatcaagtcgatgaactcactgatttacttgatgtaaaagctagtaaaattcatggtggcttaagacaagaagatcgttttcgggcaatggatgatttcaaaagtggcaaatcgcgtttcttaattgcgacagatgtggcagggcgcggaatagatgtggataatgtatcgttagtcattaactacgatttaccaattgaaaaagaaaattatgtgcatcgtatcggtcgtactggacgcgctggcaaaagtgggaaagctattagtttcgtgaaaacaaatgaaaatccacttttgcgtgatattgaagagatgctcgatgttacaattgaaaaaaaacgtaaaccgacagtgattgaagtgaaagtaaacgaagatgctttccgcaaaaaacaacaaaagcgcccaacaatcaaaaaagctcgtggggaaaaattaaataaaaacattatgaaactgtattttaacgggggcaaaaagaaaaaaatccgtgcggtagattttgtgggaactatttctaaattagaaggaattacggccgaagatattggaattattacgattgaagaccatgtttcttttgtcgaaattttaaatggaaaaggtccggcagtgctggaaatgatgcgctctcgtaaagtgaaaggtagacgcctgaaagtaaacgaggccagaaaacgataatttaaagaaaagaaggtccaaacaatggaaaggccagataatcaacttattttaatggtgttagaagttgttaaaaatccaatttacaatataaaatcactaacaattaattttctacaaggtgacatcgttgggaattccacaagaaatgagttgttatactgcacttactggcttgaatttcatggctttattcttcgtgacgaaaaaggggataaccaaaagtactatagcatgaccaaacaaggagattttctacttcaaaaaattaaaaatgaactttcttagtttgttcatacttttttaacatttattcgttatattaaaagtaacctttttttcaatgaaatatctcacctggcagcatccgtctcccaataaaaacgcggatgctgctctttttgtgtttaaaattatgatatactgaataaaaaacttggaaagtaggtggaaatatgtataaatacaccctttgttttctccaaagagccgatgaaattttattgttaaatagacaaaaatccccttggatgggaagttggaatggtgttggtggcaaaattgagcaaggggaaacacttcttgaatccgtccaacgggaaatcacagaagagaccggaatttcctcaaatgactacgaaattcgtgatatcggtgaaatgaaatggtttgtggatggtgaaaatcttggaggtatgcatttatttctggccaatcttccggataattatgtatatccaacacctcgcacaaccgatgaaggaatacttgattttaaaaaaagaaaatggatacttaatccggaaaatacaggtgtagtgaacaatttaccttatattatcgaacatgctccagtgttcccagctagaatagaagtttcaacaaaatatcaagaaaacacattattacatattagtcatcaatctttataaaaaaagcattgcgcctattcgcaatgcttccatattatcaagatgtcgtgaaataacttgcttcccagcgacttattaaattttgagcatcatctgtggataattttttatgcccgattacttgctctttagcaatttcgagactctcaaaatgatcaattaatcgttgtgaaggattattaatgtagacatcgtttagtagaatagattggttgttctccttttctatacttctaactcctacgatataaccagctgctgtaatgagtaataatttattcatacttcttcactcccttttagttgttcctgtgcaccactggacactttttttctggataaaaacatatagatgaagacgcaaataaatgcgatagctccggcaataatgtaaataccttggaatgaaagaacatgatgaatttcacccataatataaggtccaataccaagtcctaaatcaagcccgataaagtacgtagataaaccaatcccaatacgatggggctcgcagactttcaaacaaacagcttgtccattcgacataaatgttccataacctaaaccaataaggccgcctgaaataagtagtacgaggcttgatgttgcagtactaaggaccactaatccaactgctaaaaagatataactcggatacatcacatatttttcgcccttcgcatcaaagagttttccagacattggacgagtaaaggtaataactaatgcatagacaacaaagaagaacgtcccggcactcactaaattaatttctctggcatatgaagcaaggaatgtaagtacactcgaataagaaatccccattaagaaagcaataaatgtaattggaataactttatattcaataaaacttttaactgtccaagtttgtagagccttccggtgttcgtttgttaaaataatatttttcactggtaaatagaagcaaagtagcgcagttaataagacaataaccgtggagaaaataataattgtgtaaaagctcgttttgctaagtaaaatcattccgatgaacggtccaatcgcagctgcgagacttgtgctgaggccataataattaatgccttcaccgtttctggaattaggaatatacgctgtgacaattgcattggtagctgtcgatgttgtaccgtatgcaaacccatttaaaaagcgaataatgaacataattgcaatcgttggcatgtataagtaagccatggtggttattaagaaaaataatatcccaaatcttaatacccgcttgcggccaaacaattccagctttttccccatataaagtcgtgcaaggagcgttccaataatataaatcccagacgcaaatccagcttcgcccagagaggcattcaactcttcttgcgcaataacggcgataataaccattagcaaataataaacgagataaacgacaaagttaatcaatgttattaagacaaaacccttgttaaataatttttctttcatagaataaaatcccttcctacgtataatttgtaatttatctcagcgacaaggagtattataggggatattcggagaggatactttttaatttggtaattatttctgatatatacaaatttatataacatatgttgaaaaaatagggaatagtattttgtatgattaatatgctttaactggaatgacaaaaaggaggttaagaacatgaagcaaaatattcttaataattatgtaagcacaaatgattttccagttattacaaggggaaaacgtaaatatttaacctacgagggacttgaagattcttatgtctacatacttaaaaaagggattataaaaacaagtataatatcaagggatggtagggaatttaacttgaattatattaataaaatggatatcatctcccttttaaaagatgaatattcacagtttgcgaatgctccgtttaatattcgcgtggaatctgatacagcagaactatatcaagttgaccgggtaagattctggaaagacgtaaatcgtgatgttgatttgcaaatttatgtaaaagattactaccgtacgagactgctgcaatctattaaaaaaatgcaacaaatgctaatgaatggaaaattaggtgcgatttgtacgcaactctatgaactttatacactttttggagtggaaatagcgcctgatcaatttttgattgattttctagtaagcaatgaagaaattggtcatttttgcgggattaactccgcgagtagtgtgaatcggattttccaacaactcaaaaaagaaggcgtcattacgatgcaaaaccgctatattattattaaaaaattagatgttattcaagaaaacgttattttttaacagtagaaaaagcactgcaatcaataattgcagtgctttttctatcctctttttttaaatgaatatcgaatcctaagtgtgatgagtccaatgatgattaacaaaccaccaaccatcaaattctctaagtcgctaaaatcccaaaaaatagagattcctatattagatagtcctagaaaaacaaaaaccaagccaacaacaagtaaaaccaaataagctggtttagaaattttcataaggacgcctcacttacattaaaaataatttccacattattgtaacacaagttgagagaaacgacatcactcacttgttatttgttttgtaaagccttcacccacaacactttgtacatcattaataataaagaatgctttttcatcatatttgttgacgattttggtgaggggcaataattgatcacgacttatcacgatataaagaatttttttatcttgacgcatatagaaaccttgaccattgaaaagggtaataccacgctccaaattcgcatcaatttcagtagcaatttcttcataataatccgaaataatcgtcacagactttttaggattgtaaccttcaagaatgaaatcaagtactttggttgaaatataaagtgaaacgatggtaaatagcatattttcaaatccgataacaaacacagaagggataacaacaagtaaatcaaagaatagtagggcataactcgtattccacccaagatatttattagcaattttcgctaagatagcactaccagctgttgttccgccaccgttcataatcagacccataccaatacccatcattaatccagcaaaaattgctgcaacaatggtttgatttgccacgaaagcaagtggctcagaaaaatgtaaaaatatcgaagtgaaactaatagcaacaatcgtccagacaatcgtcattcgatcaagaaacttataaccaataataagtaaaataccattaaatataaaagtagtaattgcaggagtccagccaagcaagtaataaagcatcattgttagcccagtaacgccgccttctcctaaattattcgggatagcaaaaacgttgacagcgagagagaaaataagcgcccccacgataatttttgcgatgttccaacctgttttatttttgttcatctccatttctcctttccatacaaaaaaagacccaagaacacctctaaataggcactctggagtctttttataaaaaaagcattaactgacatctttgtcattaattgtctcaccataaaaaattgctattcatttcaacacaatttacaatataccataaaaaataagcaccttcaagccttttttaagtatatataattagccgaaaatcgctaaaaatggcattaaattaagtaaaaataaacctacgagaacgctgataacaattttgatgacaagtggtttttcactttctgtttttttcaatttgttttcctccttaatgtgcgcttatttagcccagtgtacaaattcattttttaatggcatataagtggctgtttttttcttatagatttggtaagcaagtataaatccaagaaacgcgggaacaataattgcaaaaatagttaaaataactttagtcatagaaaatacctcctcttaaatcaaagcacaagttcaaatcttactactaatagtgtaccaaatttcacgtgattttggtaataaagcgggctaacaaatttcggttacaattagggtcaaatgtgctacaatagccttgggtgagtaaatttgaataagaaaaataagttttttgacatttatttagaattagagcaagacattacatctggcgtttatccagcaggcacactacttccaagtgaaaatgtcctggctaagcgtttttcggtgtctcgtgaaaccattagaaaagcacttgtattattgcttgaaaacggctgtattcaaaagctccaaggaaaaggctccattgttattgaccgggaacgttattcttttccagtctctggattaactagctttaaagaattacaaaaatccgaacagatgaatgccactacagaagtcatccggaatgaagagacaactttaccagatcgaattgctgattttgctggtcttccgcacggctcaaactgcttagctatcctcagagtgcgctatttagaaggagaggcaactattttggattacgattatttattagacaaaactgaaccaattgcgaatgagattttagaagactccttgtatcaatacttagaaaatgaaaaaggttatgaaatcagttatgctcaaaaagaaataaccgtggagccactgaatgccgaagataaaaaatacttagccttacatggtgatacgcatgtggttgtcgtaaaaagtactgtgtttttaaaagatacaacactttttcagtatactgaatcgcgtcaccggttggataaattccgttttattgattttgctagaagacgctaaaaagcctgagaaacgaatctcaggctttttttattgtattaatgttaatgtttcatatggcgctaattccagttcagaactgattctctggcgctcataattagaaagaagtacttcagcatttaaaaactcagttggcagttgaatttttttcttctcggaaccaaaatgatgaatggatagaagggaagtagtttcgtttgaacgcttgtaggcgataatagaatcttcttccgtcaaatatggtgtgtaatcacccgtttgaatgacaggatgctctttccgaagtgcaattagtttttggtaaaaatagaaaatgctcgttttattagataaagcagtttgaacatttatttcgtttgcattatcagccacttttagccaaggagtcccagtcgtaaaaccagcattttgcgaatcgtcccattgcataggagttcggctgttatcgcgcgaacgttctttaataatctccattacttcctgctcactaagtccgtttttttgtaaaatatcaaaatggttgagcgtttccacatccacataatcatcaattgtagggaattttggattcatcataccgatttcttcccccatataaacaaaaggtgttccgcgcataaaatgaatcgttgcgccaagtagggtagcagaatgataataatgttccggcttgtcggaagcaaagcgaccaagtgctcgaggttggtcatggttgttccagaaaagcgcatcccaaccattttcatctgacatcgcgacttgccacgtatggaaaatagattttaagttctcgaaattcacatccgctaaacgccatttttctccatcaggatagtctactttcaaatgatggaaatgaaaaaccatcgatagttctttttcgtctggattactataacgaatgcagttgtcaatatctgtagaggacatttctccaaccgttataattggcttgtcgccaaaagttcgttcatgtagttcttttaaataagcatgtattcctggtccatctgtataaaaacggcggccgtcgccttcaaaatcatcttctaaaaacttaggtttggcaatcacatttaatacatctaaacgaaaaccttccacgcctttatcaatccaaaaattcacgacagcaaagagtgcctcgcgtacattcggattggcccagtctaaatcagcttgagtaacatcgtataaatgcaaatagtactcagaggagtcaggcaatttttcccaagcattaccaccgaatttggaaacccaatttgttggaggggaaccatcggcttttgctgggcggaaatagtaaaaatcacgatagaatggatcaccagcaagcgcttttttaaaccaaggatgctctgttgaagtatgattcaatactaagtcaatcataataccaatatttctttttttcgcttccttgataagcgttgtcacatcgtccatcgtaccaaataaaggatcaaccgcggtatagtcagcgatatcatagccgttatcattttgcggagaaggataaaatggattcagccaaatcatctcaattccgagtttttgtaaataatcaagcttggcagtgataccgggaatatccccagtaccatcgccagtcgtatcataaaaggatttcggatacacttgataaattgttttttgagcaaactttgtcataaagggaagcctcactttttagttggttgtttttgcagattcacgatactcctttttaccaaacgtacgaattggcgcagtatcgactttgtttaaaatattatatttgcggaataatacagttaggatgaaaggaacaacaatcgttattaacatacatactgcaaaaactgcgtaatatttagggttaatagacaagattccaggtaatccaccgacaccaatcgagttagccataacaccactagatacagaaaccacagccgcaattgcggaacctatcatggcagctacaaatggatataagtattttaaattaatcccgaacatcgcaggttctgtaacaccaaggtaacaagaaatggttgccggaatcgaaacttgttcttctttttcattgccgcgatgtaagaaaataattgctagaacagcggacccttgggcgatgttagatagtgcaatcatcggccagagattcgttccaccaaattgactcattaattgtaagtcaatggcattggtcatatgatgcagtccggtgactacgagcggggcatataggaagccaaatagtgcggcgaataaccaacttagtccaccagtcaagccagcataaacgacgttcgaaatcgcgtcgccaattttccaaccaattggtcctagaataacatgggcagcaagaacagtaggtacgagagcaaagaatggaacgaaaatcattgaaatggcatttggaataaatttacgtaaccaaatttcgagataggctagtaagaatccagccatgatggcaggaataacttgcgcttgatagccaatcatctgtacttgagcaaagccaaagtcccaaacaggaatgtcgcccgcttttgtttcaacaacgctataagcatttagtaattgcggggaaacaagcgttaaaccaaggacaatcccaagaatttgtgtggttcccatttttttcgcgatggaccatgtaatcccaacaggtaagaaatgaaatacagcttcaccaatgagccaaaggaaactataaacaccagcccaaaatggataaacatccacaatcgttttcgtaccgtcttctaaaaacttaatatccccaattacgttacggaaaccgagaataagaccacctacaacgattgcaggaattaacggtgtgaaaatttcagctaatcctgcaagtaaacgttgaagtaagctcatatttttcttagcatctactttggcatcctctttatttacaccttccacgccactaatttttgaaaattcattataaaaaatagctacatcattacctataataacttgaaattgtccagcttgggtaaacgttccttttacagctggaatgtcttcgatagcttccacgtcggcgttatctgggtcttgcaacacaaaacgcattcttgttgcacaatgtgtaacagatgaaatattttctttgccacctattaattctaagagagcgcttgcatcctttttatagtcaaccataaaatttcctcctttttaacttgtatatacaagttgttcgccattactatactataaatcagttgaaagcgcaaccactttaattatgttaaaataaactaaaggagagatgggcatgaaacatataagagtagcagcgattatcaggcatcaaaacaaaattttactccacacaactaaaaatgaaaattattggacattgccgggtggcgctgttgaaaatgagttaactaaagaaggattacagcgagaaatgagagaagaacttggagaagaagtgactattcgagagttaaaaattatcgcggaaaatcgctttgtatatcgtggcgaggaaatggatagtattgagttttattatattgtggagttatatccaaatagcgcactattagaactttcgacgtttacaaaaatagaacagtttgggcagaacggggagacagattacgagttaaattttaaatggtttgaaatagacaaggtgagtgagatagaaatattgccaaaatttctccaaacagagctaactcaactttcaagtgatcgtataaaacacattcaataaacagcataaaaataccccgcgaaatataggtttcgcggggtttcatttaattagtcaaagatactaatgtaatttcttttttgctaaggtctaaaaatggtaatttaacacgtgtatctaagcaatatgcgttgtatagtaatggttttaaagtcgttgtagagctttcgacttggcgaacaaaattaccaatttcttgatataaaatttcaatattttttagactgccaatttttgaatcaatgcggttttcactaacattcacattggagttcgttactttttcattaaattcatcattgatagcatcttttgtacgttcaattcttgtaaaacgagtatcttcccaatcaatctcaatgatatgacagtcatcaagttggaggaagtcacctgtccacagttttccgtcaatttcaacgatcattcgcgtatcggggaaaacctctttgttacggtatttttttagtaaataatcatacatttgtaattgcgctaaacagttatccatgtgtgtcatctccttatgggtttattataacacattgtgattatgtgaacaatcaagtcgggataaatgaatagttggaactgtaactttttaactagttatacaaaagtcctaataaaaggcagtgaaatagtgaaaataactaccagatgttatactaatattaagatgaaatgggagggagacacatgtacaaacaaatgaaattaaaagcgacagatgggctagatttacatttacatatatgggatgaagttgaaaatccagttggtgtagttcaaattgttcacggcatggcagagcacggggctagatatggcgtgtttgctgaacgtttgaacgaagcgggatatattgtagtagcagacgatcatcgtgggtttggaaaatcggctatagatgaaagttatttgggtcatttagatggtgaaacaggatttcaagatatgataaaagatgaagtagtcgttcgaacttatttaaaagaaacttatcccggactgagctattttattttcgcacacagtatgggaagtttcgtcatccggacttttatggcgcaacatcaagttgatggagtaatactgagcggaagcggattacaaccaatccctttactgaaaatgggacaaattataacgaagcaacggataaaaaaagatgaaatgaaacgaagcggatttctaaataaattagcattttggggttataataagccgtttaatgaaaatcatcgcttcagttggctttctcgtgatgtggcgatttatgaagcttatgagaaagatccgttttgtgggccggtagtcggaacgagtggatttttccataatctttttgaagccgttaaaataagccagcaaaaagaaactgtcgaaagtgtgccgaaagatttgcctattttattactctcagggagtgatgatccggttggccattttggaaaagatacgcctaaaattgcgttagctttagaagcagctggagtggaagatgttacctataaaatatacgaagatgcgcgtcatgaacttgtcaatgaattatgtaaagaaactgtttttaaagatgttattgcttggttgaatacaaaaaacaaggaagcctaactattaggcttccttttctttaattgcggatttgaccgtccccgaaaataatatatttagtagaagtaagctccgttaagcccattggccctctggcatgcagcttttgagtactaataccaatttctgcaccaaatcccattgcaaaaccatctgtgaagcgagtagaagcgttaatatatactgccgcagcatcgactttttgatgaaaagcttgtccagttgcataatcattcgaaataattgcttcggaatgttttgtcccgtatttattaatgtgattaattgcctcatctactgaatctacaactttaatggccaaaataaagtctaaaaattcatcttcccagtctgactctgttgctgctttagaatcttttagaatttctcgtgcacgttcatccgcgcgtaattcaacgttatattcctttaaagcagtttctatttcaggaagaaaggcatctgctacatcccggtgaataagtaatgtttctgctgcattacaaacagaaggacgcgaacattttgcattaactaaaatatcgattgccatttgtttttcagcagctttatcgacataaatatgacaatttcctgtgccggtttcaataactggaacagtagcattttcaagaacagtttgaattaatttagctccaccgcgcgggataagaacatctaaaaagcgatttaagcgcatcatatcacgagctgtttcacgagatgtgtcttcaattaattgaacgctagaacgagggaatccagatgcctctagtgaatcctgaataacggacataagagccttattcgaatcaattgcatcactaccaccacgtaaaataacagcattaccagttttaaaacaaagtacagaagcatcgactgtaacgtttggtcttgattcataaatgatacctataactccaagtggtactctcgtttttccaatagtgagttcggcttcatttttccacatatttgttacttctccgataggatctttcaaagcaacaacttgtttaacagcctcagaaatttctttaattctttcttctgttaaacggaggcgatcaatcattgtttcaggtgtacctttttcccgagcacgtataatatctttgttgttttcttcaagaagggaagctgtatgagtaagtaaatcattgcttagatttagcaaagctgcatttttttgcttagttgatgcttgcgctaaaaattgggctgcttctttagctgcacttccttttttaatgagttccgtcatgggaaaattcctcctttttacttgcaaataaagtcccgatttgttcaccttgcattatatcaaaaataattgtaggatttttgccattggttaaaatcattttttggttagcattcatacaataagaagcagcggaaagtttcgttaacatgccgccagttccgaatttagaacctttaccgccagcaagtgcttcaatttctggtgttatttgattgatttcagaaaacataactgcatctgggtcagttgaaggattactaccataaaagccatcaatatcagatagcatgataagtaaatcagcttgcacgagtttagctacaatagctgaaagaaggtcgttatcgccgtatttagttacatgttctagttcctcaacagcaactgtatcattttcatttacgataggaataattccgcgttctaagagactttcgagcgtgttcataacattttctctactaatagggaagtcagttacatctcgagtaagtagtacttgaccaacaacttgtccgtattcaccaaaaaacttactatatatatgcattaattcactctgaccgacagaagcaactgcttgttgttcgggaatacttgtaggtcgcactggaagttgtaatttatgacatccaacgccgattgccccagaagaaactaagataacttcttttccttcattacgtaaatcggataaaaccatcgctaatttttcgatagttcttaggttaatatggccatttccatacattaatgtacttgtaccaaccttgataactagtctcttgctattttttaaagattcgcgcatttctatgacccctctgctaattagataatacttctattttacatgaaaatagagatatgtctataatatattgttgtttggccaagtaatcactaaaaaaaggattctaagaaattttcttagaatccttttttattattttgtagctttactcgcagctgagatgactgaaacttgttttaatcctttacttattagacgtaaaataacgaaccaaacaattacgattagaacaatttgtttaaatgcaatagctggtagtgggttgaaaggacaatcccaaacgaaatgtaaagcaatcggaataataaaccatttccagaaagtgcctgtgaaaatatggtgcattcccagtttttgatctcctttagcaattacgagagcagcaccagttatggcagcccatacaacatggccaccgatagactgccaaccacgactaaagataacattcatcattgtttcaccagcaatatgaatatccttgaataaaaatgctgcatcgacactatagttaaatgcatatccaagtgattcaaaagcagcgaaaccagccccaacagccgcaccgattagtaagccgtttagaatatacttcgaattaagcgagcggatgaatagggcaacgataatcatttttccagtttcttcaataaaaccaactaataaagcattaaagtagtttaattttccaactggaataatcgaataaatgacaagtgttgcaacaagcgctgcgacaccaccgatgaaaaacattttcacaacatcgaaaacgctgatatttcgcggtgcatttgtttcgaaaaagaataataagaccgaaaatggaactgcaaaagagccaataaccatcagcccaggtatggtattactgttatcaaacaaatatgtacaagcaagaagtaaaaagtacgtaatgattaaaactaagaatactctagaaaacacccatggatggggccaagtatgtggaatgtcactagttgcaggcgtcgtatattttgttcctgcgataaatactttttcgccttcctctttagagtgctttttaaagacagcagagaaaagatttccaatttttaattctgaattcccgtgattcaaagcatgttgatgcaattctgtttgtttaaatacaacccactctggatgaggggatttttggaccaatgtaagattattaatctctttctttctatatagagcaatcatctctacatttgtaaaaggtccaactttctgttcgttctttttgaagtaccattctgacaaatgaaactccccctttagctttttattttgactccattaattattcccaaaaacgctaaaagttaaacgagcgaagggaattaatcgtttattttcttcgcttgttcgtaaaggaaattaattgaatcagctaaaaaagctgctgcggactcatttagtggttgtccatctaaatttaaatcatcctcatattttaaatcttcactaattttagttattctttttccaatatctttctcgttttggagttcactaggagcatatgttgggatactttgttgtccaagtaaataatcgacactaacatcataaagtgttgcaatttgagtcaccatttctaaatctggctcccgaataccatattcccaattgccataagtggaaggtgcttttaaaccaagtcttctagctgtttctgcttttgaccaaccttgtttttcccgtaataaagtaagtctgttacttaaatttggcataatttcactcctttttgtttgattatacaatatcttactcagtttagctatattttaacacataacgtattattttgtgattgacatagtcgtattgagttggtaatattgtattaacaactcaaattgtgtagataaggagaagatgacatgaaaacagtagacaccagaagaattaatacaacaaaaattcgagaattacgattgcagcgaggaatcacccaagctttcattgcgcgacggatgggctataggtacacatcaggttacagtaacattgaaaaaggaactgttagactatcacacaaaaatgctgttattctaagtgaaattttaatgtgcgatttgaaattcttttatgaataactagacacgggataaaaatgttaaataaaaagattatctttttaacaaacgttttatggaatttatttaaaacgaatacacacaaaatgtgtggaataagagcgaaggagaaaacatcatgaggaaaaaaacgttagcagtgtttcttatttttacggtgttagttgcattattagcgccaactaatgcaagcgcttatacaaaacttgggtatgtgatgacaaagtctagtgcaaaaaattttaaaatttatattaacggttcggcgaaagggtttaaaaatattattattagtggcgcaaaagcctggaacccatctccctacttgaatacagtaagcatagggaacgatgtcagacctaactatacggttagtagttcagggacaaacaagggaagtgttttggcggtatgcaacacaacttactacaaatcaaataaattgatctccaaaaacgagatcactttgtacaaaggctttcgttcgctttcaactaaccataaaatagaaactattgtacatgaatttggacatggctttggcctagggcacgtgaaaactaaaaatgcaattatgttagacaaagggtttataaataaaacaaaacctcaaacagacgatttcaatggcatcaaagctttatataagtaaaataaggaggattgacaatgaagaataggattacaatgattgcaggtatagtatgccttagtattttaactgcttgttctagtagtgagagtgtgaaaggaacgacatcagaagaacaaacaacatcacaaagcggagcagaaatgataaaagcaaataacggggttgtctcttaccacggaaaatacctcaaacttgctgaaaatatggataaccttgaaaaagatgccccaattatcattaaagcaaccaaaaaatccgaaaaaacaactgtaacaaaagaaacaaaagaaaatgtatttccaaccgatttttatacgatgagcgatgtgcaaataaattctatcgagaaagatacaacaggaaaattgagtgagaatatgactattaaagtgttggagtatagcgtggaaaatgttttggtagaaggagaagaatatgatttaactattgatggctataaaaatatggaaaagggagaagagtatacgcttttcttagaaaaaaatccagatggtgacaattatatactatcaaatgcagttataagtaaattcccagtggaagaattatctgaagaagaattgttcttagatggcgggcaagcaacagaagaaacagatagcatagaagaaatttatcaggaagtctatcaagaagttttggaagaatacagtgaataaaaagttttaacgcccgcaagacctcggtgtaaaaatcgaggtctaatttttttgaaataaaaatttgataaaaattgaagcttaatctagacaatttttcgtaataaaacaccataaaaacctcttgacagaagcagacgatacaagtagaatgaatcaaaccaaatcaacattttttgctacaaatggttagatttttaacaataagggtaaatccagttagtataaataaagctttttcaaataaaaggagataaaacgatgagtggaagtggtgctttttttccaatgagtgttaaaaaatttctggaaaaagggattacctcgttgtccgaagaagaaaaaatgagtacgctgcattatttggagaatgcgtatcatcaagagccttgcaacgaggaaattgtacatagattaattcaattttataatcagacagataaaacgaagaaagcgcaagaaatcggccaaaactttttgacgatgaatggctataataaggaaattcttggagagctatctgtaacttttatgaaagaagataatatggatacgtactttacattagttaggcattatatggaagaagaaaaaaaagaagcaacggaagaaatagctgataatgttattccttttcccaaacagtttgttccaagaagagatattcgtgaatttgcgtcttggcagacgacggaacaattggagtttttacaagaagctcgtttcttagaaatagattcctttttgtcagcatttaaagattttctagcggatgacactttttccccgtttgttcagtcgatgattttcgaattaatgcaagaaaaagaaataaatgaagatgttacagtccgaaaaatagataagcatggtacctttaatccaagtcttgtgccaatgcttgctgataacaaatttgcggaagccatttttgctggacttgctgagatgctcgaacatagtaatccaagccttttagagcaagtgattggaattatacagcaacatctatttatgctttatccttttgaattagaacctcgggaagtagatgtttgggtaaacgcatactataaatgggcgaatgcaatgtacggtaattattgcgttatttcggacgatgtgaatcacttagcagtagaagaagctatttccattattgaagagttagaaattaggcaacaaaattattttatataatgatatttcttgttttcaagtcagggatatctgtgttattattagtgagtatggctgaaacttgtcatgagagtaattaaattgaactaaatagatgatggagggaattataccatgtcagtaaaatgggaaaaacaagaaggtaatgttggaaaacttacttttgaaattgaacaagaaaaagtaaaagaaggtttagatagagctttcgtaaaagtgcgtaaaactcttaatgtgcctggcttccgtaaagggaaagttccacgtcaaattttcaatcaacgttttggtgaagaagctcttttccaagatgcgcttgatatcttgcttccagaagtatattctgcagcaattgacgaagctggtattgatccagtggatactcctcaagtaaacattgagtctatggaaaaaggcgaaacttgggttttaacagctgaagttacagtgaaacctgaagtgaaacttggagactacaaaggtcttgaagtagaaaaacgcgaaacagaacttacaactgaagaattagaagctgaattaaaacaattacaagagcgtcaagctgagttagttgttaaagaagatgcaccagctgaaaacggtgacactgttatccttgattttgaaggatttaaagacggcgtagctttcgaaggtggacaagctgaaaatcattctctagaacttggaagcggacaattcattcctggttttgaagaaaaattagttggcttaaaagctggcgacgaagcggatatcgagctaactttccctgaagagtatcatgcagaagatttagctggacaacctgtagttttcaaagtgaaattacacgaaatcaaaacaaaagaagttcctgctcttgacgatgaacttgcaaaagacatcgacgaagaagtagaaactttagatgaattaaaagaaaaaatctctaaacgtttacaagaagcaaaagaagaatccgttgctcaagctaaacaagaagaagttattgcgaaagctgttgaaaatgcagaagtggatattccacacgcaatggttcaccatgaagcggatcatttaatgaatcacttcgcacaagatttacaagcacaaggtctaactcctgaattatattaccaattcactggccaaacagaagaagctatgcacgcacaaatggaaaaagacgctgaaaaacgcgtgaaaatgaacctagtgcttgaagcaattgcagaagctgaaaacattgagccaactgaagaagctattgacgaagaaatttctacattagctgaaaaatatggtatggaaaaagacgcagttcgtgctgcacttggcgatatgagcgaacttaaatctgatcttaaaatccgtaaagctatcgatgtattattagatagcgcagtggaaaaataagctacgactgatttaataatttcattaaaaaatggaggggcatgagttatactcgtgtccttctgaatgtagaaatatgaatacagatgattggcatttctaataaacaaatgatattattaacacacataggagatgaaaaaatcgcctataagcaacatacctatgcgaaggggtgaaatattttgtttaaatttaacgacgaaaaaggccaacttaaatgctccttttgcggaaagactcaagatcaagtacgtaaattagtggccggtccaggtgtttatatttgtgatgaatgtatcgagctttgtaatgaaattattgaagaagagctaggtatttctgaatttgttgattttggtgaagtgccaaaacctcaagaaatccgtcatatattgagtgactatgttattggtcaagagcgtgccaaaaaagcactcgctgtagcagtttacaatcactacaaacgtattaattccaatgaaactaaagaagatgaagtagaactttcaaaaagtaatatttgtttaattggtccaactggtagtggtaaaacacttcttgctcaaacattagcgcgaattcttaatgttccatttgcgattgcagatgcgacttcacttacagaagctggttatgttggggaagatgtagaaaatattcttcttaaactaattcaatcagcggattacgatgtggaaaaagccgaaaaaggtattatctacattgatgaaattgacaaagttgctcgcaaatccgaaaacccatctattactagagatgtttccggtgaaggcgtacaacaagcgctactgaaaattttggaaggtactgtcgcaagcgttcctcctcaaggtggtagaaaacatcctcatcaagaacttattcaaattgatacaggaaacattctatttatcgttggtggagcatttgacggaatagaacaaatcgttaaaaatcgaatgggtgaaaaagtcattggatttggtacagataatgcgaaactaaaagatgatgaaacttatttatcccgtgttgttccggaagatttactgaaattcggtttaattcctgaatttatcggtcgtttaccggttatagcaacgcttgaacaattagatgaagcagcgcttgtttccattttgacagaaccaaagaatgctttagtaaaacaatacaaacgtatgttagagcttgatgacgttgaacttgaattcgagccaactgctctaattgaaattgcgaaagaagcgattgaacgcaaaacaggagcgcgtggtcttcgttcgattatcgaacagattatgctggaagtaatgttcgaaatcccttctcgtgacgacattacgaagtgtattattactgaaaaagcagctcgtggtgaagaagaaccgcaactgcaattagaagacggttctattattccaattaaaacatctgcatgattagaatgcgcgtcgtaattggcgcgcattttttctatcaagccagcttgttttactgtaatatctgacttgtttcgtgctatactttattaatattaattggagaggataaaaagacatgaaaagtgaaaacaaatttttttctggggcatttggatggataaaaataattcttatcgcgcttatacttgcttttggtattcgctattttttaatttctccagttactgttaatgggaaatcaatggacccgacacttcatgatggggagcatttatttattaacaaagtatcagatccgaagcgttttgacattattgtatttcctgcgcctgatgaggaaaatgcagagtacattaaacgcgtcattggccttccaggagataaagtggagtataaagaagatcaactttatattaatggaaaaaaatatgatgaaccttatttagattcagaaaaagcagctctaaaaaatggttttttaaccactgatgcagaaggcgatcctaattttacaatggcagacattccaaactctgacggctctctcactgtccctaaaggagaactttttgttttaggagataatcgtcaagtaagtaaagatagtcgctacattggctttatatcacaggataccgtgcttggaaaagtaatttcatttggaaaatccttagaacgttaatgtgaccctacaggaagtctaggaggagacatagatgacagatcagaatgaaaaaaagcccaagaaaaaaagcggggcgcatcaattattaagctgggtgctagttatcgttgcggcacttgcaattgcacttgtgattcgtaactttgtagttgcaccagtaaaagtagaaggaacatctatggttccaacatatcaagatggcgatagaattttcattgaaaaaatttccaagcctgatcgtttcgacattatcgtgtttgatgaacctccaatgattggttcaggagaacatttcatcaagcgagtgattggcatgccaggagataaagtagcatttaaaaacggtgagttatatttaaatggaaaacgaaaagtagaaagttacttgccagaaggaacattaaccctttggaatccagatccaacgcaaaaaccatacatagcggattatacgctggaggatatgacaggcgaaagtactgttccaaaagggaaactgtttgtactcggagataatcgcggcgggagttcagatagtcgtgttttcggatttattgatgattccatggtaaacggtacagtgatacaatttggaaaataatgtgaagtccgtgaagatactttttcgcggatttctctattaaatgagcgttttttcgtttataataagactgttagtataaaatagggcggtgcaattttttgaaggagaagaatttaaaacggttatggtcatggatttgggcggctgttctagcagtgttaatagctgttataatccgtttttatttatttgtccctattctcgtagatgggatatcaatgatgcctacacttcataacgatgaccgtgtaattataaatcgcttcggaaatgtagatcgttttgatgtgattgtttttcgagaatcagatggaaaagaatacatcaagcgagtaatcggtttgccgggtgatacagtagaatacaaagaggaccaactttacatcaatggtaaaaagtataatgaaccgtatttggatacttacaaagaaaagctgaaagatggctatttaacagatgattacagttcaaaggatcaactagatggtggtaaaattccaaaagatacttattttgttttaggtgacaatcgaagagcaagcaaagacagtcggataattgggccaattccatttagcaaggtgttaggaacaacaccgatttgttactggccgattgaagatgccaaacttatagattaggagtatataatgacaattcagtggtttccaggtcatatggccaaagctcgccgtgaggtaacagaaaaattaaaactagtagatgtgatttttgaattagtggatgcacgtatcccgctatcttcctctaatcccatgctagaagaaattatccatcaaaaaagacgagtgattattttaaataaagcagatactgccgatgaaaaaacaacaaaagaatggattgactactttgccgagaaaggtttgccagcagttgctgtgaatgctcaagaaggtaaaggactattcaaaatagaacaagccgccgaaaaattaatggctgaaaaattcgaccgtttaagaagtaaaggtatgaagccaagagcaattcgtgcgatgattttaggtattccgaatgttggtaaatcaacattaatcaatcgactagcgaaaaaaaatattgcaaggacaggtaataaacctggtgtaactaaggcacaacaatggattaaagtaggtaaaacattagaacttttggatactccagggattctttggcctaaatttgaagatcaagaaattggttacaaattagctcttacaggtgcaattaaagatgatttacttcaaatggaagagattgctggttacggtttgcgatttttagaaaaccattaccccgaccgacttcaaacttggctaaaagtagaaactgtttctgaagaccctatcgaaacactagcatttattgcagaaaaaagagggctcttagatcgatacaatgatccagattattctcgcgcagccgaaacggtagttcgagaaattcgtcagcaaaagttagggagaatgtcgtttgatttcccaaattgggaagatgaagtcgaatgagcgattccatatccgttataaaagaaaaattaagcgaagtcacttcagaaaatgatccttttttccaaaaatgtatacaggatgaacgtaaaggtgtagaaaaacttgtgcaatccgtgagacgaaaatgggaaaaggaagcaaaattacttgtgaaacttaaagaaatgacacaatatgaaactgatttatttcaacaaggatacaaatatattgctggagtagatgaagttggccgtggcccgcttgctggtccagttgttgctgccgcagtcatcctgccagctgatttttctgttgttggaataaacgattctaaacaattgagtgaagcaaaacgtgacgcattgttcgaaaagataaaaaaagaagcaattgctatcggagtagggattattgaacatgatgtaattgatcaagtaaatatttatgaagcgacgaaacttgctatgtgtgaagcgttaaatcaattaacaccagaacctgattttgttctaatagatgcaatgccactaagatataccgaggcagaactatctcttatcaagggggatacaaaaagcatttcgattgctgcagcgtctatcatcgcaaaggttacaagagataggttaatgcagatgtacgatgaaaagtatcctggctatgattttgcaaacaatatgggctatggcacaaaaaaacatttacttggtttagatacaattggtatatgtcctattcatcgcatgagtttttcgccagtgaaagaatcaaagttacattttgacagcttaaattaactaaatcctataaggaaaagcgtgttttcgacatagaaaatgcgcttttttgtattgtttcatagattttagtcattttacaaaaaagcataacatttgtagactgagagtaactatcacggaggtgtaacatatggattttaaacaacgaaacacatggctaaaacttgcttcctgtaagtctatttctgctaaaaagagagcagtcatttggcaaaaattaaaagagttagaccagtatgaaatggcagcacatacatttgtagaatcattctttccggtggataaaagagcacagattttaatggaaatagaaacggctgaagtgttctttttggaaggtattactccaatttggattctagaagatagctatccagcacttctaagagaggtttacgaagcaccaccgattttattttgcaaagggaatattgacttacttcaacggcaagccatcgccattgtcggtactaggcagatgagtgagtatggtagaaaagcttgcatgaaaattgctagtgaactttctgcgcacgatttaaccataattagcggaatggccataggaatagacactattgctcataaagccaccttaaataaaaacggtgcaacaattgccgtacttggttcaggtgttaacaaaatttatccaaagaaaaatgagttccttgctaaagaaatcgcgaaagaaggcttgctattaagtgaatatttaccaagtcaagaagcaaagaggtggcattttccagaaagaaatcgaatcattagcggtttggcaattgggacagtaataatagaagcagctgaaagaagtggttctctaattactgcagacatagcattagaacaaaacagacaagtttttgccgttccagggaatatttttattgatacttggcagggaacgaattatttgattcaggaaggcgccaagctagttatgaatgcggaccatataatagaagaattttttcaaattaagccataattctactgaaattatcgtttttaagtgatttgacttgcatttcctgattttttgagataagtttgctaaagaaagctgatataaaacatcaaaaaatggactttttcttaaaagccattgacaaacccagtaggaagggctaatatttactactgaattatgtgaaaaatcagcattgaaaacttattgaacgcgaggctaaaactgtaataggattaagacaacgagtaaagcccgtgtattgacccaaatcagggaggaatatatagatatggcagattatttagtgattgtagagtcacctgcaaaagcaaaaacgattgagaagtatttaggcaagaaatttaaagttaaagcttccatgggacatgttcgtgacttaccgaagagtcaaatgggtgtagacacagaaaatgactatgaacctcgttatattacgattcgcggaaaaggccctgttttaaaagaattaaaacaagctgccaaaaaagcgaaaaaagtctatctcgcagccgatccagatcgtgaaggggaagcaattgcatggcacttagctaacagtttagagttagatcaatcagacaaattacgtgtagtatttaacgaaataacgaaagaagcagtaaaagaatctttcaaaacaccacgtaaaattgacatggatttagtcaatgcacagcaagcgcgtagaattttagaccgtttagttggatataatatcagccctatcctatggaaaaaagtgaaaaaaggtttgagtgctggtcgtgttcaatctattgcacttcgaatcattattgatagagagaaagaaatcaataatttcaaacccgaagaatactggacaattgacggtaacttccttaaaggtaagaaaaaattccaagccaatttttatggtgtaaatggcaaaaagaaaaaactttctactgcggatgatgtaaaagaagtaatgtctgcaatcaaagggaaatcatttgacgtaacagatgtaacaaaaaaagaacgacttagaaaccctgctgcaccatttaccacctcaagtttgcaacaagaagcagcacggaaactaaattaccgtacaagaaaaacgatgatgcttgctcaacaattatatgaagggatcacacttggcaaacaaggcacagtcggcttaatcacttatatgcgtaccgactccactcgtattgcagattccgctatactagaagcaagtaactacattaaagaaacttatggacctgaattttctcgtaatcataaacgatcagataaaaacgcaaaaggtgctcaagatgcccatgaagcaatcagacctacaagtgcaatgagaagtcctcaagaagtaaaagaatatttaactcgtgaccaacttcgcttatatcggctgatttgggaaagattcattgctagccaaatgacaccagcagttcttgatacaatgcgcgttgacttagataacaatggcgtgaatttcagagcgaatggctcgaaaattaaattccacggctttatgaaagtctatgtagaaagtaacgatgataatacggaagaaaaagaaaatattctaccggatttgaaaaaaggagataaggtgcagtccgaatcactcgaacagcggcaacatttcacgcagccacctccacgttataccgaagctagattagtaaagacgctagaagaaattggtattggccgtccttcgacttattcgccaacgcttgatacaattcaacgcagaaattatgtttccttaacaaataaacgatttatcccaactgaattaggtgaaatagtcaatgaaatgattgaagagtatttcccagagattttagatgtgaagttcaccgccaacatggaaagtgagctagatgaagtagagcacggagaagtcgaatgggtgaaagtcattgatgaattttataaacgatttgagccaaatgtcattaaagcagatgctgaaatggaaaaaatcgagattaaagatgaaccagctggcattgactgcgacctttgcggagccccaatggtatacaaaatgggtaaatatggtaagtttcttgcttgcagtagatttccggattgtcggaatacaaaagcaatcgttaaagaaatcggtgttacttgtccaaaatgtgagaaaggacatgtaatagaaagaaaaagtaagaaaaaacgtattttctacggttgtgatcgttatccagattgtgactatgtatcttgggataaaccagtcgaacgtgcttgtccgaaatgtgagaaacgagcactagtcgagaagaaattgaaaaaaggtgtacaagtacaatgtacaaattgtgattacaaagaatcaacccaacaataattggaaaatggcagcacttggattcttcttgtgttgccattgttgcgcgaggaggcggacaaatggaaaagagtgttaatgtaattggagcaggtttagcaggaagtgaagcggtgtggcagttagtaaatcgaggcgtaaaggtagacttatacgaaatgagaccggtaaaacaaactccggcacatcatacagacaaatttgcagagctagtatgtactaattccttgcgagctaacggcctaacgaatgccgtgggagttattaaagaagaaatgcggatgcttgattctattatcattgaagctgctgacaaagcatctgtaccagcaggaggagcgcttgcggttgaccgccatgaattttctggttacattacagacaaagtgaaaaaccatcctctcgtgacggtgcatacagaagaagttactactatccctgaaggtccaacaattattgcaacagggccacttactagtcccgcacttgcggacgaaattaaacaattaactggcgaagagtatctttacttttatgatgcagcggcgccgataattgaaaaagatagtatcgatatggataaagtgtatttgaaatcccgttatgataaaggagaagcagcttacttaaattgcccgatgtcagaagaagaattcaatgctttttatgaagcattagtaacggctgaaacggctgctttaaaagaatttgaaaaagaagtgttttttgaaggttgcatgccaattgaagtaatggcaaaacgtggaattaagacaatgttgtttggcccattgaagccagttggattagaagatccgaaaacaggaaaaagaccttatgcagtattgcaacttagacaagatgatgcagcaggaacactttataatatggtaggtttccaaacacacctaaaatggggcgagcaaaaacgtgtatttggaatgattccaggtcttgagaatgccgaaatcgttcgttatggtgtgatgcatcgtaatacatttattaactcaccaactgtgcttgaaccaacgtaccaattgaaaacacgtaatgatctgttctttgctggacaaatgacgggtgtggaaggatatgttgaatcagctgctagcgggcttgctgctgggattaatgcggctaattttatacaggaaaaagaattagtggttttcccaactgaaacagcgattggcagtctagcccattatattacgagtgctagtaaaaaatcgttccaaccaatgaatgttaattttggactcttcccagagcttgaaacaaaaattcgtgcaaaacaagaacgtaacgaaaaattagctgaaagagcgctaaatgcaataaaaaaggttgcagaagaactataaaaacactataataattgaggactattctttgctgttcttttcatcacgagggctactttgttattttgagaaagttgatagtggtggaaagacagtttttctttccgataaatggtctagacagattttattaataaatgttgactttttcacaaaagttaagtgttttatttaaattgattgtaaatccagattaattcaaaaagttgcgaaaaatgtataaaattattgcaacgcggatattgttatgttaacatgatagtgtttgagaggtgtatacgtatgatacaagaggggaagttagagcaacagttctttgactatcttcactcagaacgtaattattcagtgaacactagtacagcttacgaaaatgatttacttgatttccgccgctttttaaatgaacaagccattacaacttatcagcaagttacttttctagatgtgcgtatttatttgactgaattaaagcaaaaatctttttctcgtacaaccgtagctagaaaaatttcaagtttacggagtttttacacttttcttttaagagagaatgttattaacgaaaatccgtttacttacgtatcacatgcgaaaaatcagttaaggcttcccaaatttttctattcagaagaaatggaagctttgtttcaagtggtctacgaagataatgaaacgcttacattacgtgatagagtgcttttggaggtattatatggtacgggaattcgggtgagtgaatgtgctggaatactgttgcctgacttagatacatcttatcaagccatcctcattcgcggaaaagggaataaagaacgctatgtgccgttcggggcttatgcagaagatgcgattacagattatttgccagaacgtgtcaatcttatgtctcgctataaaaagtcgcatgatgctttacttgtgaatcattacggtgatcctttgacgaccaggggcattaggtattgtttgacgaaaataattagtaaagcttcattaactcgaaaaattcatccacatatgttacgccacacgtttgcaacagatttacttaataacggtgcggatatgcggacggtacaagagttgcttgggcatgctagcttatcatctacccagatatatacgcatgtaacaaaagagcatttaaagtctacttatatgaaacatcatccgagggcttaaatttggaggaggttaaagaaatggaattacacgctacaacgatatttgctgttcaacatgacggaaaagcggcgatggctggtgacggtcaagtaacgcttggagaatcggtcgtaatgaaacacactgccaaaaaggttcgccgtctttttcatgataaagtaattgcagggtttgcaggttcagtcgcagacgcttttacattatttgaaaaatttgaagcgaaattgaatgaatataatggtaacttagaaagagcgtcagtcgaacttgctcaacaatggcgtagtgatagtgttttacgtaagttagaagctatgttaatcgtgatggataaagatacattacttttagtttcaggaacaggggaagtaatagaaccagacgacggcattttagcaatcggttctggtgggaattatgcgctggcagctgggcgagcacttaaaagacataatggcggtcagatggaagcaaaagatattgctcgtcatgcgctagaaatcgcttctgaaatttgtgtatttacaaatgatcatattaccgtagaagagctttgaaggagtggttaatttgacaaacttaacgttgaggaaccagttaacaccaaagcaaattgttgaaaaactggatcaatatattattggacaaaacggagcaaagaaatctgttgcagtagcactaagaaatcgttatcggagacaactgatggatgaatcaatccgtgatgaaattattccgaaaaacattctgatgattggaccaacaggtgttggtaaaacggaaatagcacgtcgaattgccaaaattgttcgtgctcctttttcaaaagtagaagctacaaaatttacagaagttggttacgtaggtcgcgacgtggaatctatggttcgtgatttggtggaagtatccgttcgtttagtaaaagaagaaaaaatgcaattagttcgtgtaaaagcagaaaaaaatgcagagaaacgtctgattaaacttttagcgccaagtcaaaagaaaaaacaaacaacctcgcaaaatccgttagaagcactttttggcggcatgaatcaaccagatgaatctcctgaagaagaagtagatcaagaattaaagaataaacgtagccaaatcgaatggcgcctccaaaatggcgagcttgatgatgaaatagtaacagtagaagtaaaagaacagcaaaatccaatgcttgatatgatgcgcggcgctggaatggaccaaatgaatggtatgcaagatgcgctttctggcatgttcccagcgaaaaagaaaaaacgcaaagtaaccgtacgtgaggcgaagaaaattctttttgaagatgaagcatcaaaattaattgatgcggatgaacttgcagcagaaggtattcatcgtgcggaacaaatgggtatgatttttattgacgaaattgataaaatcgctagtaaagaaggcggcggaaatgcacaagtttcgcgtgaaggtgtccaaagagacattcttccaatcgtggaggggtcgcaaatttctaccaaatatggtacagtcaacacggagtacattttattcatcgcagcaggggctttccatatgtctaaaccaagcgatttgattccagagcttcaaggccgtttcccaattagaattgagctggataaattaacacaagaagatttctacaaaatcttaacagaaccagacaatgcgctaattaaacaatacaaagctttactgaaaacagaaggaattgacttgattttcaccaaagaagctgtagaaagaattgccgagattgcattccaagttaatcaagattcagataatatcggagcaagaagacttcataccattttagaaaaattactagaagatttactatttgaagcaccagaaatcaatatggaatctattaaagtaacagaaaactatgttaatgaaaaacttgcaccaattatgcagaataaagatttaacacaatttattttataaaatactaggaggatctaataatgactttattagaaaaaacaagaaaaattaatgctatgttacaaaacgctgcaggaaaaacagtaaacttcaaagaaatggcggatacacttacagacgttattgaggcgaatacgtatatcgtgagccgtaaaggtaagttacttggttattctgaagcacttccaatcgaaaatgatcgtatgaaacaaatgcttacagaacgccaatttccagaagaatatacacaaagccttttcaatgtaggcgaaacttcttccaacttagaagtatcaagccaatatactgctttcccaatcgaaaacagtgagttatttacaaaaggtttaacaactatcgtacctatcgttggtggtggtgagcgtcttggaacacttatcctatctcgcttagaaagtaatttcactgatgatgatttgcttttagcggaatatggtggaacagttgttggaatggaaatcttgcatgaaaaagcagaagaaattgaagaagaagctcgtagccgtgcggtagtacaaatggcaattagctcgctttcttacagtgaattagaagcgattgagcatatttttgacgaattaaatggtaaagaaggccttcttgttgcctctaaaatcgcggatcgtgtcggcattacacgttctgtaatcgtaaatgcacttcgcaaattagaaagtgcaggcgttattgattctcgctctctaggaatgaaaggtacatttatccgtgtactaaatgataaattccttgttgaactagaaaaattgaaaaataactaaaaaaattagaaaagctttctctggaaatattcggggagagcttttttttgattgctttggtaaaataagaaagaagaacttgtgtgactggaggaatttggaatggaaattgctgaaacaaccattgaagtgcgctatgcagaaaccgaccaaatgggcgttgtttatcataataattaccttgtatggatggaaatcggtcgaacaagattaattgaaaaattaggttttcgttattttgatatggaagaagcagggtacctttctccggtattagacgtgcatattcattacggaaaaccacttcgttacggacagagggcagttgtaaaaacatggataaaagggtatgatggacttcgtgttacttatggttatgaaatttgctatgaagatacgaatgaagtagccattacaggagaaacacagcatgtatgtgtaacgaaagaagatttccgccctgtatcgttaagaagaacatttccgaattggcatgaagcctatctaaaagctttagaataaataagactggtagtgataaaaaatggcttttggtgtaaaacgtgatgaaatggagttatggaaagaaaaagcagcccgtggagagattgcaattattacgcattattggctagatgatcgctttcctgaatcaaaaactgtaaccaaagttgcatgtgtagatttgaaaaaactacaacaatgggggaaacaatatggtttagccccagattggattgataaccgtcgaaaaaactttccgcattatgatttgtttggtgagatgcaacttgttgtactgaaaaaagaaaaagcctttgaacaaatcgagcggtttcatttggaggagaaataacaatgatcaaactggaaaatgaagtattgcttgtagaaatgaaaacagcaggagcagaattaacgcgaatctttcataaagataccggacttgaatatttatggaatgctgatagcaagttttgggggcgtcattcacctgttctatttccaacagttggaaggcttgtagaagatacttacttagtcgatggaaagccgtaccacttaggacaacacggatttgctcgtgaccgagattttcaagtagtcgagcaaacagaaaagtccgtacgttttgagttggatgcagacgaagattcattggcagtttatccctacaaatttaaactatctattatttatacaatagaaaagaatacggtagctgtttcctacgaagttgaaaatacggataacaagcgaatttatttctctattggtgcgcacccagcttttaatttaccattaacagatgggacgacatttgaagattattatttggattttggaacagaggagaatttagaaacactttgtttagaaggaccttatcgcagtggcgaaattaagaaggttgttgatgaagcagcccgatatttaccattaaactacgatttatttaaaaatgatgcgcttatttttgaagcgttaaaacaaaaagaaatgactattaaatcagataaaacacctcattttgtaaaagtatcttttccagaattcccatttgttggagtgtggacggcaaaagcaggaacaccattcttatgtattgaaccttggtacggaattgcggatggtgcaggagagtctgttgaactgcgagataaagcggggatagagcatttagagccagaagcagtctttgcttctgaatatgaaattacagtaggttaaaacaaaaacccagaagagcgaaacgcatcttctgggttttattacatccattttatttttggctcttctccgttacgtattcgagtgatatttgctcggtgacgccaaattacaaagagcgcgatacaagcaacgagaacaattaaaatccagtcccccatgaaaagagaaataattaatgcagcaagtgctccaatcattgaactgagagatacatatttactaagttttagtgtaactaagaagactacaagtgcggctacaaagagtaatggcgcataggcgagaatgactccggcagaagtagctactgctttcccacctctgaatcctgcgaaaagtgggaaactatgcccgataatagcaaatgctccagttagcaaccagaaatgatgatctacattcaattgaaagaagaatggaagcaacgttgcaacagttccttttaaaatatccattactgtaacaatgctaccagccttgataccaagcactcggaaggaatttgtcgcccctaagttaccgctaccgaactcgcgaatatcttttttgtagaaaattttgccaatccataaaccagatggtatcgaaccaatcacataggctaataaagaaagcagaattaagttaattgtcatttttaaacccctcaagaagaaatgatgttttccataaagaattatagcacaaaatgaagagaattggctaaattgttgagataaatcacgatgaaaagttgaaaaaaccgcaaaaatagcttatgattagaaagtatagtagggggcgattagactaatgcaaaatccaacaaaagaagaaatccaacatatcttaaagaaggcaaaagttatcgcagtcgttggtttgagtgataaaccagaccgcacaagttaccgagtgagtcaaataatgcagcaagctgggtacaaaattataccagtgaaccctaatgcagacgaaattcttggcgaaaaaaccgtcaagcatttaacggatatcgaggaacatgtagatattgtgaatgtctttcgtcgctcagagtttttacctgaaatagcagaggcttttgaccaaatagatgcagatgtattttgggcacagcttggcatagctaatcaggaagcatttgattttttgacagaaaaaggatatcctactgtcatggattattgcattaaggttgcttatcaagaaatggattaattaaacaccatttttgaaggaagcaggttcttatagcagagcctgtttttttatgaaaaggaatttgtcactaaactatctctttattaatcagctagttaatgctattctgataaggtggttttaagcgaataacaacgtgaaagttgtagattgacggaatgaagggagttttgaaatatgaatcggaatgagtataatgatgattctattcaggtgcttgaaggactggaagcggtccggaaacgcccagcgatgtatatcgggtcaacagatgtacgcgggctgcaccatttagtatatgaaatagtggacaactcggtcgatgagacccttgcaggttttggtaagaaaattgttgtgacacttcatgaagacggtagcgttagtgttagcgatgaagggcgtgggatgcctgttggaatgcacaaaacaggaaagtccacagtagaagttattttaaccgtacttcatgctggcggtaagttcggtcaagaaggcggctataaaacaagtggtggactccacggcgttggttcctcagttgtaaatgcactttctgaatggttagtagttacaattaaccgtgacggcgcaacctaccaacaaaaattcaaagacggcggaaagcctgatggaacactgaaaaaaattgggaaatcaaaagccacagggacaacgattcgctttaaaccagatccagcgatttttccaaccacttcatttaactatgaaaccttatcggaacgtctaagagaatctgcattccttttaaagggcatgttaattgaattaattgatgaacgtgtaggtatggcagaggctttccactttgaagaaggtgtgaaaaactttgttgaatatattaatgaaggcaaagatgtgcttcatccagtagccagttttgaaggagaaaatgcgaccattgaagtagaaatggcgttccaattcaatgatggttactctgaaaatatcttgagtttcgttaataacgttcgaactcgcggggcaggttcccatgaatcaggtatgaaagcggcgatgacacggattttcaatgattatgctcgtcgggtgaatcttttgaaagaaaaagataaaaacctcgaaggtagcgatattcgtgaagggttatccgcggtgctttctatccgtgttccagaaaaaatcctccaattcgaaggtcaaacgaaagagaaactagggacacaggaagctcgccaggcggtcgatgctgtagtggcggaacatttagcttacttccttgcagaaaacccagaaacaagctcacttctcgttaaaaaggctgttaaagcccgcgaagcaagagaagcagccagaaaagctcgtgaagaaacgcgtaacggcaagaaaaagaaacgttctgaaacattgctttctggaaaattaacgccagcgcaatcaagaaaccctaacaaaaatgaactttatctagtcgaaggtgactcggcgggaggatcagccaaacaaggccgtgaccgtcgtttccaagctatattgccacttcgaggaaaagtaattaataccgaaaaagcaaaactacaagatatcttaaaaaacgaagaaattagcacgattattcatactgtaggtgcaggcgttggtaccgaatttgatgtcgaggattgtaactatgacaaagtagttatcatgaccgatgccgataccgatggcgcgcacattcaagtattacttctgacatttttctatcgttacatgcgtccacttgttgaagctggtaaagtttttattgccttaccaccactttacaaagtaagtcgcggttctggtaaaaaagaagtaatcgaatatgcttggacagatgaagaattagattctgccatccaaaaaatcggtaaaggctacatgatccaacgttacaaaggtcttggtgagatgaatgctgaccaactttgggaaacaacgatgaatcctgatacgcgtacgttaattcgtgtacgagtagatgattctgcacgtgctgaacgccgcgtggcaacactgatgggtgacaaagtagaaccaagacgtcaatggattgaaaagcatgtcgagttttctatggaagatagccaaaatattttagaaaatgaaaacatgatggttgaggaggcgaaagacatttgagtaatccagaacaacatatccaagacttagcgctagaagaagttatgggcgaccgttttggtagatatagtaaatatattattcaagaacgtgcgcttccagatgttcgtgacggactgaaaccagtacaacgtcgtattttattcgcaatgaatgtcgaagggaatactgctgagaaaggtttccgtaaatctgccaaaacagtcggaaacgttatcggtaactaccatccacatggtgactcttcggtttacgaagcaatggtacggatgagtcaagattggaaagtacgtaacatgctgattgaaatgcatggtaataacggtagtgtcgacggggatccgcctgcagcaatgcgttatacagaagcgcgactttctccaatatcagcagaacttttacgcgatattgaaaaagaaacagtcgatttcattcctaactttgatgatacgtctagtgagccgacagttttaccagcacgttttcctaaccttttagtgaatggttctacgggtatttccgctggttatgcaacagatattccaccgcataatttaacagaaatcatcgaagctgttattaaacgattagataatccactttgcacaacggatgatattatgaaaattgtcaaaggcccggatttccctacaggtgggattattcaagggattgatggtattcgaaaagcttatcaaactggaaaaggacgcgttgtcgttcgttctaaaacagaaattgaagatattcgtggcggtagaaaacaaattacgattcatgaaattccatatgaagtaaataaagctaatttagttaaacgcatggatgaacttcgtattgagaagaaaattgaagggatttcagaagtacgtgatgaaactgaccgtacaggacttcgtattgctgttgaacttaaaaaagacgccaatgctgaaggtgttctgaactacctgtttaaaaatacggatttacaagtaagctataattttaacatggttgctattaataaaaaacgtccggagctaatgggcattatcccaatgcttgacgcttatattgaacaccaaaaagaaattattacgaagcgctctgaatacgatattcgtaaagcgcgagctcgccaacatattttagaaggtttaattaaagctttgtctattttagatgaagtcattaaattaattcgtggttcaaaagataaacgcgatgcgaaattaaacctccaaacaaaatatgatttcagcgaaaaacaagcagaagcaattgtatctctacaactttatcgtttaacaaatacagatatacatgaacttcaaagtgaagcaaaatcactagcagaacaaattagtgttcttgaaaaaatcctaggcgatgaagcagaacttattgctgttttaaaagaagaactagctgaaattaagaaaaaatataaaacagctcgccgtacagaagtgcaagcagaaatagcagaaatcaaaatcgatacagaagtacttgttgcgaatgaagatgtgattgtttctgtgacgaaagaaggctatgtgaaacgtacaagccaacgttcatatgcagcatcaaatggtgcagaactagccatgaaagaagcagaccatgccatctttatccaaaaaatgaattcactcgattcgctcctgttattcacgagcaaagggaattttatttatcgaccagtgcatgagttgcctgatattcgctggaaaaacctcggggatcacgtgagtcacttggccagtgatttatcggcaggtgaagaaatccgttctgctattgcaattcaagcctttacggaagaaaaacgctttttattcgttactaaaaacggcatgactaagcaatcagctattacgaattacaaaccacaacgctactctaagtctatgatggcaattaagttaaaaggtgacgatgaactgttaagtgttcatttgattgatggcacagaagatattttcttagcaaccaaaaatggttacggtcttcgttattctattactgaaattccagaatcaggtgcaagaacagctggtgtaaaagcgattaacttaaaacaagatgatatagttattggcggtatagtccttatgccgaacgaacaaaaacatattcttcttgccacacagcgtggctcactcaaacaaatgaaagccagcgaatttgaaccaatttcaagagcgaaacgtggcttattgatgttacgcgaactgaaaagcaatccacatcgcttcattggtataacacttgctgataataacgaccacctatttatcgaaacaaacacagaccaaattgttgaaatagatgttgctaatcttcgaataacggaccgctattctaacggatcctttgtactagatgaaacaatggaaggcgaaccaacttctatttggctagcaatacccgaaataaaagatacctcagacgcaaaagaagaataaggaagaaaaagagttcttgtatagaaatatgcaagaattcttttttttgatataataacaaagaataagaggagggatacgcatggcagaaaaaatgaatgtagaaagttttaatttagaccatacgaaagtaaaagcaccttttgtgagactggcgggaacgaaagtgggcgtccatggagatgaaatatacaaatatgatgttcgctttaaacaacctaataaagaacatatggaaatgccagcgctacactctttagaacatttgatggcagaacttgcaagaaatcatactgataaattagtagacattagcccaatgggatgtcaaacaggcttttatgtttccttcattaatcatagcgactatgatgatgcactcgaaatcatcgctacaacactaacggatgttttagttgcgacagaagttcctgcatgcaatgaagtccaatgcggttgggcagcaagccatagtttagaaggtgcaaaagcacttgcagaagaatttctagctaaacgaagcgaatggaaaaatgtgtttggtgaataataatgaaagcatctacctcttgttaaggtagatgctttttattttatgatttacatgaaagcgaattctttgaaaatgacacatttgcgtcacaaatcccaaggtatttggtagtgcgggaaatactaacggagagtgatgtttgagttgtttctacttatttacaataattattatttgattatatggttaaataatagaaatttgttcacattttgtccattggtatataccggaaatgggtatataatttatttcattaagacaagcgattagctgttttaaaaggtttctaaggagaaataaactaattagagagaggaacaacgatgatgtctatcaaatctaatattatgaaaatcggagtttgtagtgtaatggttttagtaccactttcacaaacttctttaccaagttttgctgctgaggaaatagcattaaaagaaagccaagatgtggtgaatattccagatccacaattaaagaaagaactaaatttgtatctgaatcaagcggaaaatgctgatattacagaagcgcaaatggcgacgtttagaaatattacgttgaattctgggattaaagatttaacagggatagaatatttaaaaaatattactactctttctataaataatatcaatgcatcctatgaaccaatccagactcttagtagtctagaaaaattagtaataaatggggaaaatgttaacgctgatataattccagacctttctgtcctatcaaatttaacttttttagatttgagtcgaacaaatattgatgatactattttctctaaaattagtaatattcctaacttaaataaattagatattagcaataacaaaggaatcactaaaattagcgaattaaataatttaccaagcttgcaggagttacgtgtgtcagactgtcaaattactaacttcaagggaatagaaaaatttccaaatttaacagcattttatggtgatggccaattatttggaattgattcttttgaaacagatggttttaaaaatattaaaagtagtgaattgacatttgatgcaaatgccaaaactttgtttgttccattcagtattgtcactgtcaatacgattttgaattatgatggattatcattgccttataatacgaaccctgactatactagtatagcgctaggtgatcaaagttatgttgttacaaatgataaaatatctattaatcagcaaggtataacgttaagtgattttacccaagctgattttgatgagttggaagcattcgaagtgtatttaggatttgatagcggaaatatttctaaacccgctaatttagcgaatggaacctatagtttaaaacagattggtagttatagagcatttagtgttgatcactctgtaaatatcacagcacaagataacatctcttatattcaaaacgatacagttacaccagaaaaatttttaaccgatattaaagccgatgctaatggtgggacgattaccagtgaccttactgataaagttgatttcacaaagccaggaaattatacagttacgttaaatgcccaaaacacaaaaggcttaaaaggtgaacctatccaagtcacagtcactatcattgaaaaaacagtgattactgcagaccctgaagtgacttacgatttaaatgaagcaataacagaagaagaattcttagctgaaatcaaagccacaaccaatgatgatacaatgattaccagtgattttgaatccgctgtagatttcacaaaagctggagaatatatcgtcactttaaatgcggaaaatgatactcaaaaagcagcgccactaacggtgaaaataagagtaaatccgaaattaccagatccagtagttccaataccatatccagacccaacaccagacccaacaccagacccaacagttccagtgccaacaccggaagactcaacatcagatgatggaggcgttcaacattcaaactcaagaaatcctagaatttctatttcagattctagcttagagaagttaccaaaaactggagattctctgcccgaatcaggagtgttattgggatttttaaccttagccttaggcatagtaatacgtaaaaaataaaaaactatccgctcgaatgccagagcggatagtttttttgtatttaaatcaaatattaaagagatatgattctatttcgacaaacttttgtcaaaaatagcctagatttttactaatttaaattacttattaaaatccgcatggcatcaataaatgtagatgaaaaagtcctcgaaaaatactaaaattcgctttttcagccatttttgtacacattttgtctattggtcttatatgctgaggagactataattacatcataaagttccttttgaggatgcctattaaaagtttctagactaatataacagagtggagaggataatgacttatgtcagttaaatcaaatatcgtaaaaattggggtatgttttgccgtacttgcagtcccagtttcgcaaacaacattaccagtatttgctgcagagcaacctggattaaaagcaagtcaggataacgtaaatattccagattcaacatttaaagcctacttaaatggactactaggacaagcgagtacagcaaatattacagaagcgcaaatggattcattaacatatattactctagcaaatataaatgttactgatttaacaggcattgaatatgctcacaatataaaagatttaactataaataatattcatgcaacaaactataatcaaataagcgggcttagtaatcttgaacgcttacgcattatgggagctgatgttacatccgataaaattccgaatttaagtgggttgactaatttaactctactggatctttcacacagtgctcatgatgattctattttaaccaaaataaacacactgcctaaagttactagcatcgaccttagttacaatggtgcaataacagatattatgccacttaaaacaatgccagaacttaagagcttaaatattcaatttgatggtgtgcatgattatcgagggattgaagattttcctaaattgaatacactgcttgcatatagccaaaccataggcggtaaaaaactgattaactccgatattaaaagtagcaaattaacttataacgcagaaaatcaaacattatacgtcccattcagcttgatgacggaacggactgttaattatgatggctatgtaccagattttgtgaaatcaactgctagcagcgacacttactttacaatgaatgagcaacaagtaaatggtaatcgcctaacaattacaagcgacggtttaacagtaagtgatgtgagtaaaactgattttgataatcttgaaaaaatggaatacaatgcgagaatcgatttgagttatcaatcttacaacactccggaacagttccaaaatggtggatcttatactatctcgatgccaatctatgatcattacttcactgttgaccattctttgaatatcacagctgatagtgaaaaaacatatatagaaaatcaactagttacagaagcaacatttttatcagatattcatgcgaaaactgatgacggatcgaccgttacaagtgatttcgctgataaagtagatttcaatactcctgggacgtacacagttactctacaatccgagaataatgccggattaaaagcaacacctgttcaagtaaacgtaacaattaaagcgaagacaacgattactgcagatgaaaaaatcacttataaagtagacacatctaaaacagaagcagcatttctagcagatattaaagcaacaacaaatgatggaacagcgattacaagtgattttgcgactgttgtagatctttccaaacctggaaaatatgtcgttacactaaacgcagaaaatgatttacaaaaagctttgccagtgcaagtgatggttattgttgaaaaagaaacaccaataccagacccgacgcctacaccaacaccggacccaacaccaacaccagatccaagtccaacacctaatccggttatcaacccaaacgtaaataaaccagaagtgccaagttacaaaattccatcgttaactgtaaatgagaaaaaagctaaagcagaaccaagtaaagaggctttacctaaaacaggggattccttacctgtagcaggtgcaacagtaggatttctattaattggcttaagttggtttgtttctaggaaaaaataaaaaaaactatccgcccacttaagggcggatagttatttgttcatgacgctagttaacatggcgacataagcttgagcgccagctttagttaaatgaacaccatctggagcaaagtactgagattgaccactggatcttgaataccaatcaacaacagttacattaggtcgtgaagcagcattggcaatacttttatttacatccgattgccaaccacgaggaacccgtgtgttaactaagtaaatcgttgctttatcaaattgatctaataaatcgtttaactggtcttctgtgaagggaccatttgtaccaagttcgagaatgacagagctattttcactattgaattttttatagccggtagcagttgtaatggcatctcgtaattgacgtccaactagaccatcaattgtgatattaggaactgcctctttcaagtatggttcaatatcaagcatgaccgaatcaccaattgccaccgtttgcgtaattattgtttttggagtagcagctgatttatttttattgtctggtttttgtgtttctttttgttcgctagctttatttgagtctgcttctttatccttagtagctttatcttcttttttatcatctttcttctcgtctggggtagaggtggttgttttaacagacgtttgttgtttttctgcattggtgttgacggaaagaacgtttgacatgcccagcgtaaagattgctaaaacagcaacaacaccagcaatgcttaaccatttaccaacaggtttatttttccaaatgaaatagtttttatctttgaagcctttaaaatagttaataaaaccattttttcgaattggagtctcaataaagcggaaagataattcagcaataataaaagtagccgcaacttgtaggatagctcgccatatattaggctgagtaatttctagtactggtgtagtcaatgttataattggatagtgccataaataaataccataagatcttgttccaatccatctaagtggtttaaaactgaaaatcttgcttagataagaagcggggtgcgagatagttgcaatcataataacgcctagaattgcaacgaataacaagccaccacggtataagaaaggttgatattcacttacaaaagctgtgaatagaataaaacataaaatactgattgttcccgcaatattgagaactgccttacttttccttggaaccacaggactaaggcgattgaaaggccaaacaaatgcaagtgcacaacctgatagcaaatcaaatgctctcgtatccgtgccgtaataaacacgacttggatctgttccaggaacgtacaaaatcgtcatccaaactgcggaaagaagaccaaggccaatgacgatttttaataatagtttcggatttttgacccatttgagaaacaccagtaaaaaagcgggccagattaaataaaattgttcttcaatggctagtgaccataagtttttaagtggtgatggaagtccaaaagaatcaaaataagaaacattgtggaaaataaaccaccagttacttacataaaagaaagaagcaatcgcatcgccacgtaagttttttaagatttctggatggaagaagacggaatagatgacaaccaccacaatcattacataaactgcaggaatgagtcgtcgaaaacgtctaatccaaaattgttttaattgaagtgattggtttttttcccattgtgttaataaaatatttgtaattaaataaccagataagacgaaaaatatgtctacgccaatgaatccacctttagcccagctaaaattcaagtggtaggcgattacagcaataactgcgagtgctcgaagtccatcaatactcggaacatattttctactgtagcgagtagtccttttcaaaataacatctcctatttgtgataagtaaatatgtgtgtgtaaacctagacagagatagtaaagagatctgtttttagctccatactataataccacacataaatcaagaagtaatttaaaatgctgaattaattgatagattttaaaaatttgagtatatttgcttatttttgttatagtaaatataagtaaaaagtttgggggaaagcattttgacggaaatttttgcccatcgaggcagtagtggaacgcatccggaaaatacactaccagcaatgaaagcagcgattttatctggcgcagacggtatcgaacttgacattcatgttcttaaaagtggtgaactaatcgtcatgcacgatgaacgcgtcgataggactacaaatgggactggttttttaaaagattacacactttcagaagtaaaaaaattagtgattggtaaacggcttttccgtaaaatccgtgtgccaactttggaagaaatttttaagttggtgagtggcactgatatgatactaaatattgagttgaaaacggatgtctttgaatatgaaggaatcgaacaaaaagttttagcattagcggataaatttcctgaagtcaaacgaatgtactcttcgtttaacccagatacactcattcggctgagagatttaaatcctaccgccaaactagctttaattacacacgaaaacttagatgaagtattgccattacatgaaaaaattcagcttgatgcagtgcatccaccagtaaaagcaatgaaaaacccaattttaaaacaaatcgcagcacgctattggacggtgaacaaggaggaaactatcacgcattttatagatgccaatgttaaaggaatgatgactgattttcctgaaagggcagcggcactaagaaataataaataatctccatgagcaaaacgctttcattataaatcgttaaaagatataatcataataagttaataaatattattgtctgagattcggagagactgcaaaaggcgagcgcaatcgtcttactttgcagtctctttttttgtttttaaacttaaagcgtttcagttagattgaaaagtggaaaagtaactaagaaggcataattcagatggtaaacaatttgaagggggcaaacaaaatggtacaattattttcagcgtttgacagagaaacaatcgaaagaaatcttcaagaggaaaaatttgatttagtcatcgtcggtggaggaattacaggagcgggaatcgctttagatgctacttcacgaggcatgagtgtcgcgcttgttgaaatgggtgatttcgcgagcggaacatcgagccgttcaacgaaattagtccacggtggattaagatatttacaacaatttgaaattaaagaagtagcagatttaggaaaagaacgtgcgatagtctacgaaaatggaccacacgtaacgactcctgaatggatgatgctcccgttccataaaggtggcaatatgggcaaaactaccgcttcgtttggtattcgtttatatgactatttagcaggtgtaaagaaaaatgaacgacgtaaaattctaagcgcaaaagaaacactagcaaaaaatcctttcgtgaaaaaagacggcttaaaaggatctggttactacgtagaataccgcactgatgatgcgcgtttaacaatagaagtaatgaaaaaagcggtagaacttggagcgaatgccattaactatacaaaagcagagcatttcttatatgatgacaataaacaagtagttggcgtaaccgtaacagatcgtttgtcgggcaaagcatacgatattaaaggacatcgagttattaatgctgctggtccatgggtagataaagtaagaaaattagattacgcaacaaacaacaaacatttacgcttaacaaaaggaattcatttggttatagataaacaaaaattcccgatggaacaagctgtatactttgatacacctgatggccggatggtttttgctattccacgcgataaaaaagtatatgttggaacgacggatactgtatacgacgaagcagtaatcaatccaaaagctcttgaatctgatcataattatgtgattaaggcgattaactatatgttccctgatgtgcatattaccgaaaaagatattgaatcaagttgggctggggttcgtccacttatctatgaagaaggtaaagatccatctgaaatttcacgtaaagatgaagtttggttttctgaaagcggcttaattacgatggcaggcggtaaactcactggttacagaaaaatggccgaaaaattattagatgacgtttctaaaacattagcgaaagaaactggtaaaaagtataaaacagttcaaacaaaacatttaccaatttctggtggtgacattggtggttcagaacaattagaagctttcctatctaaaaaagcgaaagaaggtaataatcgtttcggctggactttagaagaaggccgtgagatggctaaacgttttggtagtaatatcgatcaattatttacttatgcacaggaacataaagaacaaaacgaaaccactttaccaaacagtttgtacgctgaactacgctactcaattcaacatgaagcagtgacaacaccaatcgatttcttattacgtcgcactggctacttgcttttcgatatgccgtacttacttgaatggaaagacgctgttgtggatgaaatggctaagcaattccactggagcgacgatgtaaaacaaacctatattgaggaattaaatattcaaattaatgatgctagagaaccggctgattggcacgatagataattaaaattcaaaaagagcgcaaatctttcaggatttgcgctttttttctggaaaaaagcattttcgctattttcaagaaacctttttcatggtacattgattacaggtgaaaaggaggtttttttttgagcaagattcctgtcatcgtcatcgtgggcccaaccgctgtcggaaagacaagtttaagcattgaactagcgaaaaaattggacggagaaatcatcagtggtgactctatgcaggtttatcgtggattagatatcggtacagcaaaaatcacaccagaagaaatggatgaaatcaaacattatcttattgatgtgaccgatccttccgaaccattcactgcagcgaaattccaaacagaaacaagaaaatggatagaaacaatacatcaagctggtaaactaccaattattgttggcggaacaggactttatattcaatctgttttctatgattatgattttggtaacgtaagcgaagataaggcttaccgagcggagttagagcaactaaacaaaactttattgtggcaaatgctcgaacaacaagatccagaaagtgcagcccagatacatgaaaacaataagcgccgagtgattagagcattagaagtgatgcatctaacaggaaagcctttctcggagtatcaagtgcataatgtacttaatgatacatataaaccactttttctaggacttgatttggacagagcgttactttacgaaagaataaatcaacgagtgaatttaatgtttgaagaaggtttagtgacagaagcgaaaaaattgtatgaccaacatttagtcgatgttccagctgtttgtggcattggctacaaagaattatttccttattttgaaggaaaaagctcgctagaagaagcaaaagaattaattcaaaaaaattcgcggcatttcgcgaaaagacagttaacgtggtttaggaataggatggagattgattggattcaagcgggtgttagtactaccgaagccgaagcgttgaataaagccgagacctttttatcagttaaataacgcttttctgtttggtaagaagaaataaagggtatttgaaattagccaaccaattgcacaatggaacttcattggggtttgggaaattttttagtataagatagagattggagagggaaattatgaaacaaggtggacaagggttacaggactattacttaaatcaattgcgtaaggaaaaaattcttgcaactgtatttttaacaaacggttttcagttaagaggacgcgttgtaagttttgacaattttaccgtactactagatgtcgaaggaaaacaacagcttgtatttaaacacgcaatttcaactttctccccgcagaagaatgtcgctttaaatcctgatgcggaataagcacgttacttaaaagacaaggaactcgctttttttgcgatgtttcatgtcttttttttatgctcaaaatatgctacgattagtcttgtctgaaaaagggagaaatgcttgtggaacgagaaaaaataatacttgtaggcgtctttttgccaaataaaaccgaagaagctttctggaattccatgaaagaactacacagccttgctaaaacggcgaatgctgaagtgatggatgaattaattcaaaaattagagagagtaaaccaagcgtcattcattggttctggtaagctggatgaactcgctgcgctagtggaaatgcatgaggcggatgtagttatatttaatagtgagcttagtgctacgcaagtgcgcaatatttcggctgctgttgaggcgcggattattgatcgaacacaattaatcttagacatctttgctatgtgtgcaaaatcaagagaaggaaaattgcaagtcgcatatgcgcaatataaatatcttttaccaagacttagtggacaaggtatttctttgtcaaaattaggtggaggtatcggttcgagaggccctggggaatccaaattagaaatggataaacgtcatatccgcgaaaaaatgcatgatatcaaagcacaattaacgcatgttgaacagcaccgtaaacgaatcattgaacgaaggaatacgcaatctgtttttcgttttggtttaattggttatacaaacgcaggaaaatcaactattttcaaccgattaacaaatgaaacaactttacaagaaaataaattatttgcaacattagatccgacaactcggaaagttcgcttttccggcggatttcaaacgcttttgacggatacagttggatttattcaagatttgccaacgacattaattgcggcatttcggtctactttggaggaaacggctaatgtagatgtgttaattcatgtagttgatgcgtccaatccagactatttacaacatgaaacgacagtaatttccttattagaggaacttgaaatgaatcatctgccaactttagtcatttacaataaaatggatcatgcaccagccacgtttgtacctgatcaaccagaaagtctgcttatttcagccttagatcaagaggctccagatacaattaaacagcgaatgatacaattaattgaaaaaaattgggctttctttacgatagaactttcagaagagaaaggaaaagaattagcacaaataaagcaacaagcttgggtaacgaaactagaatatattgaaagtaaacagagttaccacatagagggatacaaaccgagaaaggagctaaataatgaataatattcaagcgatgcgaaaaaaagtggaagtacaaattgctgatttgcaaaatgaaacagatgaaattgctgaatttaatcaagcgaaagttttagatgcgtttcaagagaataaagtaagtgattttcattttcatccttccacggggtacggttatgatgatgaaggtagagatacattagaacatgtgtatgccactgtgtttaagacagaggccgcccttgtacgtccgcaaataatttcaggcacacatgcaatttcaaccgtattatttggaatccttcgcccggatgatgaattactttatattactggtcaaccttatgatacgttagaagaaattgtaggaatgcgaaatcaaggacaaggctctttaaaagattttcatattggctatagttctgtgccgcttcttgaaaatggcgatgtagattttcctcttattgctgaaaaaatgacacgaaagacaaagatgattggtattcaacgttcgcgaggttatgcggatagaccttcttttacgatagataagattaaagaaatgatcatatttgtaaaaaatatcaatccagaagtaattgtatttgtggataattgttatggagagttcgctgaatatctagaacctaccgaagttggcgcagatattatagcgggttcattaatcaaaaacccaggtggtggcttagcaaaaacgggcggttatattgctggaaaagaagcgttaatagatttatgtggttatcgtttaactacgccaggaataggtagagaagcaggagcatcactctacagtttattagaaatgtatcaaggtttctttttagctcctcatgtaacggcccaagcaatcaaaggagcgcgtttcacggcggcgatgttagcggagtttggtgtcgtggctgacccaacttgggatgcgccaagaacagatttaatccagagcatttcttttcataataaagagaagatggttgcatttgcccaagctattcaagcagcttctcctgtgaatgctcatgtattgccaatcggagcctatatgccaggctacgaagatgacgtgataatggcagctgggacatttatacaaggtgcgagtttggagctaacagcggatggtccgattagagaaccttatcagctctatgttcaaggtggtttaacatacgaacatgtcaaaatcgcagttactcgagcaattcaaaaaacattgtaaaaaagtaacatttatttttcagaaaaaattttttaatttttaccgcgatggattcattcgcggtttttttgtatgtaatgcattggtatataaggttttatctataatgttagattatctaacataaatttgacaaaacatctaacgtacattataatgctactatcatcaaaaaaataattatgttttgagggggaattgtcgtgagcgaaaaggaaatccggagatcgatgccgctttttccaattgggcctgtgatgaagctaactgatctcactgctagacaaattcgctactatgaagaccaaggattaatccatccggcacgaaatcaaggaaatcaccgtttgtattcacttcaagacattgatgttttgctagagataaaagattatttgaatgatggtctgaatattgcgggaattaagaaaatgtaccaaatgcagcaaaaagaatctaaagaaccgttgacagatgatgatgtacgcaaaatacttagaaaagaaatgcaacaagctggtcgctttgtaaagcaagatgcgacagggaaacaacaattaccaaggttttaaaaagacaagaagaggtatttactttatttagaagttaatataattagattatttaggaggaatttagattatggcaaaatatacaaaagaagacattttccgcttcgcagatgaacaaaatgtaaaatttattcgtttacagttcacggatattctcgggataattaagaatgtggaaattcctgttagccaactaaagaaagcactagataacaaaatcatgtttgatggttcctccattgaaggctttgtaagaattgaagagtctgatatgtatttattcccagacttagatacttgggttgtattcccttggacagctgaaaaaggaaaagttgcaagaatgatttgcgatatttataatcctgacatgactccattcgccggagacccacgcgctaacttaaaacgtgtacttaaagaaatggaagagttaggtttcacagaatttaacttaggacctgagccagagttcttcctatttaaattagatgaaaatcgtcgtccgacgcttgaattaaatgatagtggtggttacttcgatttagcgccaacagatttaggtgaaaactgtcgacgtgatatcgtgcttgaattagaagagatgggctttgaaattgaagcatctcaccatgaagtagctccaggtcaacacgaaattgattttaaatatgaagacgccgttacagcgtgtgatagtatccaaacatttaaattagtcgtaaaaacaattgctcgtaaacatggtttacacgcaacatttatgccgaagccactctttggtgtaaatggttccggaatgcacttcaatatgtcgctatttaatgaaaaaggaaatgctttcttcgatgaaagtggcgaactagaattgagccaaacagcttatcatttcttagcagggatgttgaaacatgctcgtggctatacagctgttacaaatccaacaattaactcattcaaacgattggttccaggatatgaagcgccatgttacattgcgtggtcaggtaaaaaccgtagcccgcttgtacgtgtaccaagttctcgtggactaagcacacgtcttgaattacgtagcgtcgatccatctgctaatccatatttagcaatggcggtactacttaaagctggtttatctggaattaaagatgaattaactcctccagcaccagttgatcgtaacatttacggcatgaacgaagaagaacgtgaagcaactggtatttatgatctaccagaaagcttaggacacgcattaatcgaacttgaaaaagacgatattatcaaagctggtttaggtgaacacattttcgaacactttattgaagcaaaaacaattgagtgtgatatgttccgcacagcagttcacccttgggaacgcgaacaatatcttgaaatttattaatagtcaaaagctcgtttcctaaaattggaaacgagctttttttatttgaaagtgggtatcaaatgtttgaagtttggcgaatagaggcatatatttaaaaatgtgctagtgaaagggaggtttcattagagaaaggggaagaaatgcagattactttagctattttagtttttgtcctaacgctgtttttcgtaatttggcagccaagaaaattatcgattggatggtcagcttgtggcggagcgttaatcgcattattacttggtgttgtcaccttagctgatgttatgacagttacagggattgtatggaatgcgacacttgcttttattgcgattataatcatttcactcattttagatgaaattggattttttgagtgggcggccctacatatggcacgtttagcaagagggaatggattattaatgtttattcttatttctattttgggtgctcttgtcgcggcactgtttgctaatgacggagcggcattgattctgacgccaattgttttagcaatggtgcgagcgctggattttgatgagaaaaaggtgtttccatttattatagctagtggatttatagcggatacaacatccttgccacttgtagttagtaatttagttaatattgtttcagctgatttttttggcattagtttttcacggtatgcactcattatgtggatccctactattttttcattagttgcaagtattatcattttatatatctatttccgaaaagctttaccgagaaaatacgatgtaaatgcgattcaaaagccagcttcagcacttaaagataggaagatgtttcatatttcttggggaatccttactattcttgtagtaggctattttttaagtagttttttagatataccagtgtcgtttattgctttactagtcgctctaattttcttgttagttggtgcaaaaagccactctgtttcaacaaaagctattctaaaaggagcaccttggagcattgtttttttctcagttggtatgtatgtggttgtgtatggcttgcaaaatgttggaatcaccaaactattatcagaagctattacctatgtcgcgcactttggtttatttgccggaacaatcggaatgggtttcattgctgcgatactatcgtctgtcatgaataatttgcctaccgtgatgataaatgcgctagcaatcgatcatacttcatttaccggagtaatgaaagaggcgctagtatatgcaaatgttattggttcggatctaggacctaaaataacacccattggctcgctcgcaactttactttggttacatgtgttagctcagaaaggcataaagataagttgggcgtcatacttcaaaattggtattgtcattactattcctgttttgttcattacgctcgtaggcttatacgtatcattacttatttggaactaaaaaacccctcgtacacttaattaaaagtgtgcgaggggttttattatgccttataaagaacatgtggttttaatggattaccatttattaaggctggatgttcgaaatcggctatttttgttaaatggatttttctcatgactttttcagaaggtttattgcaagttgcagtgaaactgtaaatttcgttgatagcagtgattcccttagcaaatgctaatacgcctaatgcagcttcagttgcaaagccttggttccatgcgctacgctttaaccgccaaccaatttcgatgcaaggggtgaattctgcttcgaatgtcgcttcatgcaatccagtaaatccgatgaattcattagtagatttaacttcaattgcgaaaaggccatatccaagggaagtcagttctttttggtttctatcaagtagtgcgttactttctacttgagtcaatctagctgggaagtatttcattacttcttcatctgcattcatttgactaaaaggaaggtagtcacgttctaaataatctcttgcgataagtctctcggtttcgaaataaatcatcttaaaaaccacctgtttaagaaataaaattagcgaatatctctataaagcccgattacttttccaaggattgttacgttatttaaaagaataggctctaaagcatcattttcgggttgaagtctgaaatgattagcttctttatagaatcgtttacatgtagcttcattttcatcggtcatagctacgacgatttctccattgattgcggaactttcctgtctaacgattactttatctccatcaagaattccggcatttatcatactttcaccatcaatttctaacatgaagacattggtttcaccagcagccatgtattctggcagtgggaaatactcatcgatgttctcaattgctgtgataggcattccagctgttacttttccgataataggaatatttacaacattgggagtttctgcttcatcttctaaagataatatttcaatcgcacgaggctttgtagggtcacgtctaattagccctttaccttcaaggcgagcaagatgcccatgaacagtagaactggatgcgagacccactgcttcaccaatttcacgtacggaaggtggataacctttttcttttacttctgatttaataaattcatatatatcttgttggcgtttagatattttcatggtttcacctcattaaatttatggttattttataattcaagtatagcaaaagggaaaccaatatgcaaacaaaggttcgtttttttattgacatgtacgaacggttgttctataatatagaaaagcgaacatacattctttttggagggattattaatgactttaaaattaatttgggataaattttatgtttctattatatttgtacttacttgcatcgttttagggattattttaatgtgtacagtggttggcgggggaagcgactattcagaggtgaacgtaaacgaaggggactccttatgggcattagctgatcaatacgcaggaaagagcgatatggcgaaagcggactttgttagctgggtagaaaaagaaaacaatctatcagacggtcatgtggaagcaggagattctgttgttatccctgtacacaaaacaaagttattaaagagtgatagcacaattcaactagcaaatcagtaaggtcgatttagtgaccatttatgatataataattgaaagtagcgattttgctgctttcttattttattaatggaggaaaaggagaataaccatgctagaaaaagctaaaatagatcgtattaatgagctttctaaaaagaaaaaagccggaacattaacttctgcagaaaaagtggagcaagataaattaagaaaagaatacatcaagtcttttcgcacgcatatgaagggaacaatcgaaaatacaacgataattgacccaaatggaaaagatgtaactccgcataaagtaaaacaactcaggaagaataagtactgataattagtaccaaataaacaattatgagcaaatgaacaaaaataccaatcaattaagcaatttaaagcaattattagttgtgttaattgctttttaggcttattattaaaagtagttaaaattatattgaagagaggatgtttcatttgttcgataacacagatagtttagcagtgaatacaattcgtacattatcaatggacgcaattcaaaaagcaaattctggtcatccgggattaccaatgggagcagctccaatggcttacgcgctttggtctcgcgtattaaacacaaaccctaaaaattcacattggtttaaccgggatcgttttgtactttctgctggacacggctcaatgcttttatatagtttattacatttaagcggattcaaattagaattagaagatcttaaaaatttccgtcaatgggaaagtaaaactccaggtcacccagaatatcgttatacggatggtgtagacgcaactactggtccacttggtcaaggtattgcgatggctgttggtatggctatggcagaaagacatttagaagcgaaatataataaagatggtttcccagtggtggatcattatacttacgcactatgcggagatggtgacttaatggaaggtgttgcttcagaagcggcttcttatgcaggtcatcaacaattaggaagattagttgttttatatgattccaatgatatctctcttgatggtgatttagacaaatctttctctgaaaatgtaaaacaacgctttgaagcttatggttgggaacatttattagtaaaagacggtaatgatacagctgaaattttagctgcaattgaaaaagcgaaacaaaacacttctcaacctactatgatcgaagtgaaaactgttatcggttttggtgctccaaatgccggtacaagtaaagttcacggtgctccactaggtgatgaaggtattttagaagcgaaaaaagcttatggttggaactacgaagagaaattctttgttcctgaagaagttactgctcgctttaaagaaactattggcgaacgtggcgaaaaagcagaaaaagcttggaatgaattattcgcttcttataaagctgaatatccagagcttgctaaacaattagaagatagtttaaacaataagttaccagctgattgggatgcggatcttcctgtatatgatgattctaaagcacttgctagccgtgcttcaagtggcgaagtaatcaatgcattagctgggaaaataccaactatttttggtggatcagctgaccttgcgggttctaataatacaacaattaaaacagatggtgaatttacaaaagcaactccagctgaaagaaatatttggtttggcgttcgtgaatttgcgatgggtgctgcattaaacggtatggcacttcatggcggattacaagtatatggtggaacattcttcgtattctctgactatgtacgtgctgccattcgtttatctgccattcaacatttaccagtaacttacgtaatgacgcatgatagtattgctgtaggtgaagatggaccaacacatgagccagtcgaacaacttgcaagcttacgtgcaatgccaggtctttctgtcattcgtcctgctgatggaaatgaagtagtggaagcttggaaacttgctatcacttctacatctacaccgcatgtacttgttcttactcgtcaaggtttaccaacattaccaaattctgctaaattaactgcagaaggcgttaaaaaaggtgcttacgtaatttcacctgcaaaaggggaagtaccggaagcaatcattcttgcgagtggttctgaagttaacttagctatcgaagcgcaaaaagaacttcaagctcaaggaacggatgtatcagttgtcagtgtgccatcatttgatctattcgagcaacaatctgcggaatacaaagaaagtgtattaccgaatgctgttagaaaacgtattgcagtagagatgggcgctagctttggctgggaacgctacgttggattagatgggaaagttatcggaatcgacaaatttggcgcttctgctccaggtgaaactgttattaagaattatggctttactgttgaaaacgtcgttaatacagtaaaatcactttaattaaacaatcagaccgttgctagtttttctagagcggtctgtttttttatgctttttttagattgcgccgtagtaccattaatggtataattacgaggttgtttgcagcttttattgataaattgatctagatgataagttttcttgaaaagtattgtctgtttaatataaatcaagtacaataaaagaggattttgtttcaaggaggagaaaagagactatgtggatttacattcttgtcggcattatttgtttactagctggtcttgcgggaggattctttattgcaagacgttacatgatgagctatttaaaaaacaatccgccaattaacgaacaaatgctacaaatgatgatggcacaaatgggtcaaaaaccatcacaaaagaaaatcaatcaaatgatgagtgcgatgaacaaacagcaagaaaaagaaaaaccaaagaaagctaagaaataatctttttaacggagtaaagccctttaaaattagtttgcaaaaagctaattttaaagggcttttttattggtagaattatcatcattttttcttatatagcgagttacaataggaaacaaactaaaatccacatcatagtttaaaacggttaattttattagaagtgtttgagtgaactgtttgatatttataagtggtatttctggaaggtagctgggaattgtttctgaaatggaaattaaccagttttttacttcttcgttacttattttttgttcaaaaagggctgttattaatatattacttaggcgttcatcttcttcgccggttagcattttagtgtttgtcttataaaaaaatgcaattgtagtcattatttttttaacgtctatttcactaattgttctttggtaaattagttcatctaaagcatctgctgtatgggcgatgcaatgtgcccaacctttttcttcaataaaagaatgagtatttttttcgttttttagtagctcaataagcaaattcaaagtttccctaatttcactatccgttaagaaattatgaaccttattattttctagtagtaatgcgataattaaggctaaaaatgagcgttgaaatactgcatctgagtcaatgatattaatcttgaacagtaaattattcttatttactgcataattataaattctcattttttgttccgtagttaaattatcctgaacaacaagccactcggaaaaaatattgtaagcaatattatctcttaattcgctatccgtggaagaaagataggacaacattgtatcaattatttcattagatgtatttgggtctttaggtaatgtatattcattttgttttaacgtgttgaataaattaggattatgcacattacttcctaccttcttttagtttttagttgcagatataatcagcatcattgggcggcggtattcatcttgcatttctggcaaatcttttaattcgggagccggttcaggttcgatgatactgttaatttggaagccatttttgagaagcgtttgtatataggtggtgagtgtgcggtgatatttttgtacatcttcaccaaggaaatggcttgtgcgtattgattcattgaaataacgatcaacgggccagtgtaatttgttgccagcttcatctgtaaaccaatcttgacgtccgtctgctgtgaatatggggtgttcaacagagaaaacaaatgagcctccagttattaggttggtatttactttttggcaaatatcgttaaaggaagcgacgtaatgaagtgcaagagaactaagaacgatatcgtatgtttcaggttcaatgtcgatattttccatagctcttcgctcgtaatggacaattggagatgtcgttttgtgcttagcttctgtaagcattcgtgcggataaatctactccaactactttttttgcaccctgctctgcggcataaatacagtgccaaccaaatccacaacctaaatcaaggactactttttgatggaaatcagggagaagctttttaaattcatgccattcaccagctgcttgtaagccttctttcgagcgaggcatttggctatattgttcgaaaaaatgtttgtcatcgtatttattttctttcattattaatcctcttttcatcaattaatcagatgtgtgactgaattctttatctaagaagaggtgagcaagtccgctcacttgttttaagcgtaagatttcattagcatccattccaatatttttcataatccaactatcggacatcccgctatctacaagttcactaacaatgttggacattaattcgacattatgaaatccgcgtgcacgattatgacgtattgtagaggccattcgattcacggtgtctttttctaagatgactactggcaggaattcattttcccgttcacgaattcgtttagaagtgatcataatagtgtaacggtggaacccatctattatttcatatttatcgctgtcttccaaggggtaacaaacaattggttgcgtaaaaccatcttcccaaattgatttttcaagtagtttgagttcggttgcggggacggtgtttggattataattatttgcttgtaattttgtgtagtgaatgggggtgacactatacactgggcttttataattcattatttcacctcataaaatattattatatttctctaatgcgttttttcgcttctctaattctagctttgtctggccgaatcccatgtatttacaggtataatcattttttaaaatcgcaatacacattcgtttgtaggtaggaacgcttgcgaattctttgattttcaaatcgtctggatactccttaaaacgaacgatttccattggattagtatatactcggttattttgtggtttacctaggaagtctgcttgtatctctagattttttaattcttctacagtttctacttttaaagcaccacctttttcggtccaataggtaatgctcgttttgaatttttttaaatagcgttctctagtgtaacttggtaaagttgtgagtaaaaattctaaatatgatttccaagtatgatttttaggtagtttaatttctttccaagccattgcggaagtgccaccgtaaatggcagtaaaattggcaccattcactcgaccgactaatttggaccaaagcgcgggttcaatgaccctgtacagtttaagactttctgtagcggcatcgttaaaaggactggcaacacgcatatcgtgcacagttaggcctgcgtgataaaataaatcataaattttattataggaccaattgaactttgcattcgcaacccatatatcttctacttgccaatcgtgaattggataggcattgtaaatatttttggagatttcggtcgtccaattgtatgttttatacattcgttcttttttatgaattgcgttatagcgattaagagattcttgttgtcgtataccaatcaaagcaatggtttttttggcgttatttttagtatgtaaccagtgaattatttttttattaaattcataatcccaaaggttttcaaaatcaaagtcaaacggggcattatcttcattaatcacgtgtggaaaggtaggcatatctctaacccagatgttccgcttggacttttcccatggtttccagtggtcggtgaacatcgaaacagctgattgcgccgcgatgggaagacaacaccaaagtggttcgatgatatctaaattagttgtaagcatttcagtaacaaaatcagttgtagcactgtattgaccttcgtaatctaaatgatatacatatattttcttgcgaatattatttttccgtatgtagtcaatcatgagatggagcattactgcgctatctttaccacctgaaaacgatacgataatattatcgaattcagaaaaaatcacttccattctttcttgggaagcatcaaagactgttctagaaagcatccattatcacctcaaaagaatttttttgtgagagttcttttttgaattcttgcaataaacttgttttcttagaaatatttgtatcgatgagagaatccagtccgacattaccgcttaaatcatgatagtagcagtcttgtgtttgcccagttctataaatccgtctttccgattgatcacgctgagaataatcaaaggttttatcaaaataaataatttgattataaaattgcaaattgagtccgtaagaagatttggcaaaagtagtaatttttacatttggaaatgcttgctgtaatgcctcttctgaccgtctgtatttgcaaaaaataattgttgtttcttcttttccagcaattaatgattctgtaatagtaaatttttcagaagaaagacagtaacaatgttgcatcacttgagacatttctaaaaaattaatgttgattgtatatgcagcggctttttggagatagtcttcttttatttcataatattgctttaaaagttcctcatcaatggaaaaatcatgacgaatataatgccatttgacagctaattcatgcgaagaagtaaaaataaaaggggtgattaatttatataagtactctaaattatgatactttttaatgatatccattgattgttgcgtactttgtgttagttgcgtaatagtgacgtattcgcaaaaagtttttttaaactgggaaaaacttagatttaatattttaggagataaaaattcgagttgtgaccataaatccaaaatattacgactaagaggtgtaccgttcataattaatttataggtagccaaacgagagagtttaatcgctcgttgtgttcgaagggcatggatgttttttatctttagactttcatccataataatgtaactattggtggaatttttgagtttattccggcaatacaggtataagcgatcagagttggagagagattcaataccgatgatttcttgtgggaatttataaccccatttgtttatttcaatttcgagattttcttttgtttgaaaaggggtaatccataaaacataatctggttttgcgtcgttgattaactcgcaagctacccgagtttttccactccctggtttcataaatagagcgccaaccttatattttttgagttttatgaatgcttttttctggttatctaataaggtcattttcaattatcacatctttttctatttttttaggaatatgtgtacgaactttgacaatgctgtcattcactttttttgtgtggaaaaactgcattatctcgtcactttcttttttaaagcaaagaatcattttggagacacttaattctttcttttctgtatgtttttttagaaagaagttccatgtatctggaaaataaaaataactgtattgtggtgtaagtgaaaacaccatctttttaggtagcaagaaaaaataaccttcatattcactttcagagggcatttcaataattgtttgattatcccattgttctacacgttcactatatgtataaattttgtgccattttaccatttatatctaatgctcctatgtgttttgtcgttttcgttcacttttatctatttattcgtttattttatcacaaataatattaaagttaaggataaaactgttttgatggacggaaaaattattataaataagaaaaattgtggataaaaaaaggaaggctaggagcaaatttaaatgtttttttattttttggtagaaaacacttttgtaatagccagctttttagtagaatagataatggtggatggaaaacttttctatctatgaatagaatatgaaattggaggctattatggataccccagattataaacgagttgtattaaaattaagcggtgaagcacttgccggaaatgatggctttggaattaacccgagcgtggtcaatttgatttctgctcaaatcaaagaagtagtagaactaggagtagaggtagctatcgttgttggcggcggaaatatctggcgcggtaaacttggtagtgaaatgggaatggaccgtgcagcagcagaccaaatgggtatgcttgcgactatcatgaattccttatctttacaagattcccttgaaaatattggagtagcaacgcgtgtgcaaacttccattgatatgcgtcaaattgcggagccgtatattcgtcgtaaagcaattcgccatcttgaaaaaggtcgcgtcgttatttttgcaggtggaacaggtaacccatacttctccacagatacagcggcagcactaagagcggccgaaatcgaagcagatgtcatcttaatggcgaaaaacaatgtagatggtgtctacaatgccgatccaaaactagatgaaaatgcgaaaaaatacgaagaactttcttatcttgatgtgattaaagaaggtttagaagtaatggatacaacagcatcatcactaagtatggacaatgatattccattaatcgtcttctcatttacagaacaaggcaataatattaaacgtgttattttaggtgaaaaaattgggactactgttagggggaaaaaataatgagtaaagaagtattatcgaaatccaaagaaaaaatggaaaaagcagaacaagcgttaacaagacaattaggtacaatccgagctggtcgtgcgaatgcatcactacttgaccgtttatctgtagattattacggagcagctactccagttaaccaaatggcttctatcagcgttcctgaagctagaatgttgctaattacaccctatgataaaacaattttaggtgaaattgaaaaagcaattttgaaatcagatttaggtttaacacctaataatgatggttctgtactacgtttatctattccacaattaacggaagaacgtcgtaaagagttggttaaagaagtgaaaaaagaagctgaagaagcgaaggttgctgtgcgtaacattcgtcgtgaagcaaatgaagaactgaaaaaactagaaaaaaatggcgacatcacagaagatgatttacgttcttacggtgaagacgttcaaaaattaacagatgaaagcatcaaaaacatcgatagcatcacgaaagacaaagaagcggaaatcttagaagtttaattgatacttttcaaatagtaacaaatagggttaaacaccttttaagttgaagtgacattcctaattctttccatatgtgttgggttgggaatgttttttaatgggcaattccatctctctcatgaaaatctcatctgttcacatggaatttttagtacattaattgattcttttttgttattataggtatagacatgctctaagaagtgtatcaattggaggatttatgatgtttaaaaagctatttcgacaagatgaaaatatattaaatagtgaacttgcagaagatttgcctatcccgcgccatgtagctattattatggatggtaatggaaggtgggcgaagaaacgttttttgccgcgcattgctgggcataaagaaggtatggatgtcgtaaagcgagtgacacgatatgctaatgcaattggcatcgatgttttaacgctttatgcattttcaactgaaaattggaagagacctacagatgaagtggattttttaatgaaacttcctgtagaattttttgactcttttgtaccagagttgattgaagaaaatgttcgtgttaatgtgatggggtacagagaaaatttacctgatcatacgatgcgagccgtggagaaagccatagctgatacagcacattgcacagggcttacgcttaattttgcacttaactacggtggacgttcagaaattattactgcggccaaagaagcgatgaaagaattagaacttgaagggaaaagtgcagatgatctgacagaagaaaaattaaatgatcatttgatgagtagtggtttgggcgatcctgacttgttgattcggacgagtggggagcttagattaagtaattttatgctttggcaacttgcgtatagcgagttttattttaccgatacacattggcctgatttttcaaaagaggattttttacaggcaattattgaatatcaaaaccggtcacgtcgttttggagggctctagggaggaaaaaagattgaaaacgagaattattactgcagttgttgcgcttatattttttattccatttgttgtttacgggggaattccatttgaattattaagtattttacttgcaactattgcattatatgaagtgcttgtaatgacaaaacaacgaattttttcgatgaatggaataattaccttactattaatgtggttagttgtcgtgccagatagatatttggattttttagatacactgcatattacagaaatggaagttatttttattttaatggctttattactggctaatacggtattttcacgaaataaattccattttgatcaagtgggtatttgtatggttgccgctttttatacaggatttggtttccattacttggcgttaactcgtgaagctgggttaatgtatgtactttttgctttatttattgtttggtcaactgatacaggggcttattttattggaaaagcgattggaaaacacaaattagctccgaatgttagcccgaacaaaacagtggaaggctttattggcgggattgtatgcgcacttgtcattgctgggggtttttattattttgcggagttaccaggaaatattgcatttgtactagcgcttttagtctttctttctatttttggacagcttggcgatttggtcgagtcagctttaaaacgcttctatggtgtaaaagattctgggaaaatcttacctggacacggtggtattttagaccgttttgatagcttgttattcgttttacctctgctacatatacttcaaattatttaattggagatgggataatgaaaaaaattattttgctaggtgcaactggttcaattggaacacaaacgcttgcaatcattcgcgaaaatcctgaaaaatttcaagttgttgcgcttagttttgggcgtaatatggaacgtggtagggcgattataaaagagtttaaaccaaaaatggtcgctgtttggcatacgagagatcgtgttaccttagaagcagaattcccaaatgtgaaattttttaatggtttagaaggacttagagaagtagcgacctatttagatggggacgttcttttaaatgcagttatggggagcgttggactacttcctacattagatgcaatcgaagctgggaaggccattgcaatagctaataaagaaacacttgtcacggctggacatttagttatgcgtgcggcgaaagaaaagaacatttctctattacccgttgatagtgaacattctgctattttacaagcattaaacggagaaaatacggaaagaatcgaaaaaataattttgacagcgagcggtggaagtttccgagataagacgagggagcaactcagcgcggttacggtgaaagaagcgttaaagcatccgaactggaatatggggaataaattaacaattgattcagcaacgatgtttaacaaaggtttggaagtgatggaggcgcactggctgtttggtgtagattacgatgatattgaggtagttatccagcgcgaaagtattatccattctatggttcagttcgtggatggaagtttcatcgcacaacttggaacgccagatatgcggatgccaattcaatatgctttaacctatcccgacagactctatataccgtatgaaaaagaattccggatcactgatttttccgcacttcattttgaaaaagtggattatgaaagatttccggcattgaaactcgcgtataatgctggtaaaataggtggaacaatgccgacagttttgaatgcggcaaatgaaattgctgttgctggctttttaaatggacaggtagctttttataatattgaagcacttgttgagaatgcaatgaatcgtcatactagcatttctaatcctgacttggatacgattttacaagtcgatcaagaaacacgcgcgtatgtaaagacacttttatagaggtgaagctattttgacaactattattgcttttattttcgtattcggactgattgtatttttccatgaactaggacattttctttttgcgaaacgtgctgggattatggtgaaagacttttcaattggttttggaccgaaaatttttgcttatcgtaaaaaagaaacacaatatacgattcgcttattaccgattggtggctatgttcggatggctggggaagatggcgaggaaattgagctaaaacctggttaccgagtagggcttgaattaactccggaagaaactgttagcaaaatcattgtaaatgggaaagatcaatatgtaaatgcgcagccaatcgaagtttctctctgtgatttagaaaaagaacttttcattgaaggctatgaggattatgatgatacaaaaaaagttcgctatcaggttgagcgtgatgctctagtcattgatggtaagatcgaaacaatgattacgccgtatgaccgttcttttaatgcaaaatcattaggaaaccgagcaatgactatttttgctggaccgctttttaactttattttagctattttaattttcacagcacttgcttttgtacaagggggcgttccgagcaccgataatacgcttgggaatgttctaccggacggagcagctgctgaggctgggctaaaaaagggggatgaggttctttccatcaatgggaaggaaacgaaatcttggactgatattgttcaaaatgtttcagaaaaccccggaaaaacactcgatttcaaaattgagcgtgatggtaagacacaagatatcgatgtcaaacctgcaacacaaaaagaaaatggcaaagacgtaggaaaaatcggtgtagaaacgccaatggattcctcttttactgctaaaataaccaatggatttacgcaaacatggaattggatcgttcaaatatttacgattcttggaaatatgtttacaggcggattttcgcttgatatgttgaatggcccagtggggatttacacaagtacgcaacaagtcgttcaatatggctttatgactgtactaaactggactgctgttttaagtattaacttaggaattgttaacttgctaccgttaccagcactagatggcggacgtttaatgttcttcttatacgaactcgttcgcggcaaaccaattgacccaaaaaaagaaggcattatccattttgctggatttgcacttttaatggttctgatgattcttgtgacatggaacgatattcaacgagcatttttctaaaaagagatagactaataaagggaaaaaggggtgttttaaatgcgtcaaacgatgacatttataccaacattaaaagaagttccagcagatgcggaagtaaagagtcaccagttacttcttcgcgctggttttataagacaaacagctagtgggatttatagttatttaccacttgcaacattgatgttaagaaaaatcgaaacaattattcgtgaagagctagaagcaattggcgctgcggaattattaatgcctgcacttcaacctgcggaactttggcaagagtctggtcgttggaacgattacggcccagaattaatgcgcctaaaagaccgagcttctcgcgactttgcgcttgggccaacacatgaagaagttattacagcgcttttacgcgatgaagttaaatcttacaaacgtttgccgcttactttataccaaattcaaacaaaattccgtgatgaaaaacgtccacgcttcgggttattacgtggtcgcgaattcattatgaaagatgcctattctttccatgcaaccagtgaaagtttggatgaagtgtataacttaatgcaccaagcttattcaaatatctttactcgttgtgggcttgaattccgttctgttattgcggattctggttctatcggtgggaatgaatcaaaagaatttatggcgttatctgatattggcgaagatacgattgcttatagtgacgcttctgattatgctgctaacacagagatggctccagttttatatatggagaaaaaatcgcatgagctagagaaagacctggaaaaagttgccactcctgaccaaaaatcgattactgatatcgttggatttttagaagttccaattgaaaaaacaatgaaatcgatgctttatcaagtcgatgatgaagttattatggttctcgttcgcggtgaccatgaagtaaatgatattaaaatcaaaaatgcattagatgcaaccaatgtagaattagtggatccagctgttgctgttgaactattaggagctaattttggttccctaggaccaatcaatgttcctgaaaacatgcgcgtgtttgcagataatgctgtgaaagatatcgttaatgcggtagttggtgcaaacgaagatggtttccattatattaatgtgaatccagatcgcgatttctccgttactagctattttgatttacggatgattcaagttggcgatttatctccagatggtcagggcgtaatcaagtttgctgaaggtatcgaagttggtcatattttcaaacttggaacgaagtatagtgaagcgatgaatgcaactattttagatgaaaatggtcgagcacagcctatcattatgggttgttacggaattggcgtatcacgtattttatctgccattgcggaacaatcgaatgatgaaaatggttttgtatgggacaaacaaattagtccatttgatttgcatttaattcctgttaatatgaagagcgaagagcaagttgcttttgcagaaacactttatacatccttacaagatgctggcttcagtgtcttaatcgatgatcgtgcggagcgggcgggcgttaagtttgcagatgccgatttaatcggtttaccaattcgtattacagtaggtaaaaaagcagcagaaggcgtagttgaagtgaaaatcagaaaaactggcgaaatgattgaagttcgtcaagatgagttactaaacacgctgcctatactctttggagataaataatttattgagcaattcatgccagatgaaacttcactcgttctataaaaacgggttatgagggacatctggcttttataaatttgaatgaaggggtgttattcggaatgactgcaaaagaggaagaaaaacaagaacgatttcagctgttaatgacacaaatcggtttacaagatgtaacaacctacgaagaatttacaaaagatgctaaaatcgaaaaactcgttgccgataagaaaaataaaacatggcaatttcatttacacgttccacaaatttttccagcagcacttttccatatgatggatgttggaatgaaacgcgcattcagccaaatcgcggaaacagaaatgcaaattgttccagaaaatcaaacaatcaacgaaacgctcattcaagattattggaacttaatcgtagagccaattggaaagcagtcaccgatgattggaaagcttttaatggagcaaaaacctacatttaaagaaccccattttattgaagtagcagtccataatgacatggaagaagcgactattcagcaacgattccagacgaaaattattgaaagttatgggaaagctggatttccacgtctagcaatgaaaatgcacatgcttgaccagtctgaaacagatgaatataaagcttttgcacaggccaaacaagaagaagatcagaaaaaagccgctgaagctgtgcaagttatgcaaaaacgacaagcagaagggcaaagcggtggcggtggagcagctccactaacaggtccgttccaaattggttataaaattaaagacgatgaagaagttaaacgtcttggggacatttatgatgaagaacgacgtattacagttcaaggcttaatctttgcgacagaaattagagagcttcgcagtggtcgtagtttgttacaattcaaaattaccgattatacaagttcaatgattataaaaatgttttctcgtgataacgaggatgcggcgatgttccagaatttgaaaaaaggtatgtgggttaaagttcgaggaagcgttcaaaacgatactttcgtgcgtgacttaatcatgatggcgcaagatgtcaatgaaatcgctggagtgaagcgtcttgatactgctgaagaaaaacgcgcagaactacatcttcattcaccgatgagtcaaatggatgccacttcatctgttgattcactgttcaaacaagctgctgattggggacacaaagcaatcgctattactgatcattctgttgcccaatctttcccagaagcgtatggagcagggcaaaagtatggcttaaaagttatttttggcatcgaagcaaatctcatagatgatggcgtgccaatcgcttataacgatcaacatattgctttggaagatgcaacatattgcgtatttgacgttgaaacaacaggtttatccgctgtttatgatacgatcatcgaacttgctggcgtaaaaatgaaaaatggtgaaattattgataaatttgaagcttttattgatccaggacacccactttctgcaactactattaatttaactggtattacagatgacatggtaaaaggttctgatcccattgatgttgttttaaaacgatttaaagaatggagcggtgatgatattcttgtggcccataatgcttcttttgacatgggttttattaacactgcttatgaaaaagttgggctagaaaaagcagaaaatgcagttgtcgatacattagaattagcacgttttctttacccacattttaagaatcaccgtttgaatacattaacaaagaaattcaatattattcttgaacaacatcaccgggctgtatttgatgctgaggctacagcatatttagcttggaaattaattaaagatgcgaaagaaatgcacaacatcgatttccatgattctttaaatgactatatgggagaaggcgacgcatacaagcgtgcgcgaccattccacgccacaatttacgcacaaacggctgttggtttgaagaatctctttaaattaattacgatgtccaatattaattacttttaccgtgtgcctcgtattcctcgttctcagctaaagaaattacgtgaaggtttaattattggaactgcttgtagccaaggagaactatttgaagcaatgatgcaaaaagggatgcaagcggcagaaaaagtagcagagttctatgatttcattgaagttcaaccgaagccagtttatgcaccgcttattgaacgtgaactagttcgtgacgaaaaagctttagaagaaatattgaaaaatatcgtccgcgttggtgaaaaaactggaaaacctgtcgttgcaacaggtaatgtacattacaaagatccagtggataaaatttatcgtaaaattttaatccattcgcaaggaggagcaaatccgcttaatcgtgctgaattaccagatgttcatttccgtacaacggatgaaatgttgaaagaatttgccttcttgggtgaagaaaaagcaaaagaaattgttgtaactaatgcgaatttagttgtcgattggatggaaaatcttaaaccaatcaaagacgaattatacacgccgaagattgatggcgcagaagatgaagttcggaatatgagctatgcgatggcgcatcaactttacggtgagaaactgccagaaatcgtagaagctcgactagaaaaagaactgaaaagtattatcggacacgggtttgcggttatttatctcatttcacataagcttgttaagaaatcacttgtagatggctatctagttggttcgcggggatcggtcggttcttctttcgttgcgacaatgacggaaattaccgaagtaaacccacttccaccgcattatctttgcccgaattgtaaggattctgagttctttgatgatggttcggttggttctggttttgacttacctgataaagattgtccacattgcggaactgcttatcaaaaagaagggcaagacattccatttgaaactttcttagggtttaaaggggataaagtacctgatattgacttgaacttttcaggagattatcaaccggtagcccatgcttatacaaaagaaatttttggtgaagattacgttttccgtgcggggacgattggtaccgttgcagagaaaacagcttttggttatgttcgaaattatgagcgagatatgaatatgactattcgcggggcagaaattgaccgacttgtagctggttgtacaggcgttaaacgaactaccggacaacatccaggtggtattatcgttattccagattatatggatgtttacgattttacaccggtacagttcccagctgatgcgacggactcagaatggaaaacgacccattttgactttcactcgattcatgataacgtattaaaactagatatacttggacacgatgatccgactgctatccggatgttacaggatttaagcggtattgatccaaaaacaatcccaaccgatgatccagatgttatgaaactatttggatctacagagtcgcttggtgttaaaccagcagatattgattcaaaaacaggaacattaggaatccccgaatttgggacgcgttttgttcgacaaatgctagaacaaactaaaccaacaacattttctgagctagtgcaaatctccggtctttcccacgggacggacgtttggcttggtaatgcggaagaattaatcaaaaataaaacatgcgaactgccagatgtaattggttgtcgtgatgatattatggttttcctaatttatcaaggactagaaagttcattagcctttaagattatggagtctgtgcgtaaagggaaagggttaacagatgaaatggaagaagcaatgatggcgaataaagtaccgctttggtacattgaatcttgtaaaaaaatcaagtacatgttccctaaagcccatgctgctgcttatgttttaatggcagtacggattgcatatttcaaagtacattatccactatacttctatgcgacttatttcaccgttcgtgccgacgattttgatttaacatcgatggtaaacggaaaagaagccgtgaaagcaacgatgaaggaagtaaacgataaaggaatggaagcttcaaccaaagagaaaaacttattaactgttctagaaattgcgaatgaaatgcttgctcgtggtttccatttccaaaaagtcgatttatataaatcgtctgctgatgagttcattattgacggagaatcacttattccaccatttaatgcgattccaagtcttggaaccaacgtagcaaaacaaatcgttgccgctcgtgaaaatggagaatttttatccaaagaagacttgcaacaacgtggaaaagtgtcgaaaacgattattcagtacatggatgatcaaggatgcttggaaggattgcctgatcaaaatcagttgtcactattctaaaaatgggcaaaacttgcttgtagtcacaatttgtgataaacttatttaagaaatactacgataactcagccaagcgtgggccaatgcccacgctttcgttttgcaaatctgtcaaagagtcacctgtggcagaagtaggggacgaattagctggaaaagcgtatctcttaaggaggctgaaatgagtaaagtactagaacaagtagaagcaattgttgcgccaatcacggacgaacttcaactagaactcgtagatattgcctttgaaaaagaaggcccaaattggtttttacgaatttttattgacaaagatggtggcgtagatatcgatgaatgcgcagccgtgagcgaaaaagttagtgagaaaatggacgaaaatgaccccattacacaaaactactttttagaagtatcttctcccggggctgaacgtccgctgaagaaagagcaagattttgaaaatgcggtaagtaaatatgttcacgtcacttcttatgagccaattgacggtcgtaaaatgtgggaaggaacgcttgttagttatgacggcacaacactcgttattactatcacggacaaaacacgcaaaatcacttgtgaaattcctaaagacaaagtagccaaagcaagactcgcaattcaattttaaaaagcaaagaataaggagctgaataaaaaatgagcacagaattattagatgctcttcatgtgttagaacatgataaaggtatttcaagagaggttttagtggaagcaattgaagctgctcttacatctgcatataaaagaaacttcaaagatgcacaaaacgtacgcgtagatttaaatatggaaaacggttctatccgtgttttagctagaaaagaagcggtagaacaagtatttgactctcgccttgaaatctcgatggaagaagcacataaactgaaccctgtttatcaaccgggcgatgtggtagagcttgaagtaactccaaaagatttcggacgtattgctgctcaaacagcgaaacaagttgtaactcaacgtgttcgtgaagcagaacgtggcatcatttacgatgagtttatcgaccgtgaagatgacattatgactggtatcgttgaacgtcaagattctcgtttcatctatgtgaatctaggtaaaatcgaagcaattttgtcgcaaaatgagcaaatgccaaacgaaacttaccatgcacatgaccgcatcaaagtctatttgacaaaagtagaaaagacgacaaaagggccacaaatctttgtatcccgtacacaccctggcttacttaaacgtctttttgaaatggaagtaccggaaatctatgacggtgttgtagaaatcaagtctgttgcacgtgaagcaggagaccgctctaaaatctccgtctacactgcaaatgaagaagtggatcctgttggcgcatgtgtcggaccaaaaggtgcacgtgtccaaacaatcgtcaatgaacttaaaggtgaaaaaatcgatatcgttgaatggtcagaagatcctttcacattcgttgctaatgcacttagcccttctaaagtgttagatgttattgttaacgaagcagaccaagcgacaactgtaatcgtaccagactatcagttatcactagcaattggtaaacgtggtcaaaatgcccgtttagcagcgaaattaactggttggaaaattgatattaaaagtgaaacagttgcaactgaactaggcatctatcctcgtaatggtgtagaagcgcccgaagtagaagaagcagagagcgaaacttttacagaagatgaagagtaaaaaggagaattatcatgcgtaataaaaaaatcccccttcgaaaatgtattattaccggcgaacgcttgccaaaaggcgaacttcttcgtattgcgtattcgaaagacggagcgcttacgatagatcctacaggtaaagcacctggacgcggtttctacattgttaaaagtgtggaagcatgtgaaaaagcgaaaaagaaaaacgctatttttcatcaactaaaaatgccagaacaagagtccttttacgatgagttaatcgcttatgtgaagtctctcgaggaaccaactaatggataaaaaagcactttccttattaggcctcgcgaaccgagcacgtaaaattactactggtgaagaattagtattaaaagcagttagaaatgggaaagcaaaaatggttctcatttcagaagatatatccgaaaaaaccgagaaaacaatccgcaacaagtgtgaatactataatgttgtcgtgaaaaaagccggcacccgggaaatgatagggggtgcaatcggcaaagatacacgtgcaatcgttgcaatacttgataaaggatttgctgttaaattagcagaattactcggttgaatcttatacggaggtgtacgacatgagtaaagttcgtgtatatgaatatgcaaaagaacatcaagtatcaagcaaaaaagtcattgaagcattgaaagacttaggtattgaagtggccaatcacatgtccactattaatgaaaatgcattaagacaattagataatgccgttgatggcacaaataaaaaagccgaagcaccaaagaaagaaactactagcaacgaaaatggaaatagtaaggggccaaacaaaccaaatatgacaaatagtaatgaaaagtcgaataaaccaaataaaccagcaggacaagctaataaaccagccactgcaaacaaaagccaaggtgcaaaaccagcgacaaacaaaccagcaaacacaagtaaccaaacacaatcaagtggtacccaacaacaagctggtggacaaaaacgtaacaacagcaatcgtccaggtggcggcaattcaaaccgtccaggcggaaacaatcgtccgaatcgcggcggcaattttaacaataaaggccgtaacacgaagaaaaaaggtaaactaaaccatagtacggtaccaccaactccgccaaaaccaaaagaacttcctgaaaaaatcgttttcagtgaatctttaacagtagcggaattagcgaaaaaattatacagagaaccatctgaactaatcaaaaaattatttatgcttggcgttgttgctacaatcaaccaatcattagataaagatgcaatcgaactaatttgtgacgactacggtgtgcaagttgaagaagaaattaaagtcgatgtaacagatttagatgtgtactttgaaaatgaactaaatgaagcagttgacgagtctaaacttgttgaacgcccaccagttgttactatcatgggacacgttgaccatggtaaaacaacattactagattcccttcgtaatacaaaagttactttaggagaagctggtggtatcacccaacatatcggtgcttaccaactagaaattcatgacaaaaaaatcactttccttgatacaccgggacatgctgcctttacagcaatgcgtgctcgtggtgcgcaaatcacggatattacgattttagttgttgcagcagatgatggagttatgccacaaacaattgaagcaatcaaccacgcgaaagcagcgggaatgccgattattgttgctgttaataaaattgataaaccacaagcaaacccagatcgtgtaatgcaagaattgactgagtatgaattagttcctgaagcatggggcggcgataccattttcgcaccaatctcagctaaattcggtgaaggtcttgaaaacttgttagatatgattttacttgtttctgaagtagaagaattaaaagcgaaccctgaccgtcgtgctatcggttctgtcatcgaagcagaacttgataaaggccgtggcccagttgcgacgttactagtacaagatggaacgcttaatatcggagacccaattgttgttggtaacacatttggtcgtgtccgcgcaatggtcaatgatttaggccgtcgcgtgaaaaaagttggcccaagtacaccagttgaaatcactggattaaatgatgtaccgcaagctggcgatcgctttgttgtttttgaagatgaaaaaacagcaagaaatatcggtgaaactcgtgcaagccgtgcactagtagcacaacgttccgcaacaaaccgagtaagtttagacaacttatttgaacatatgaaggctggcgaaatgaaagaagttaacgttattattaaagctgacgttcaaggttctgtagaggctcttgccgcatctcttcgtaaaattgatgtagaaggcgttaacgtaaaaatcattcatactgccgttggtgcaatcaatgaatcagatattactttagcagcagcttctaatgcaattgttattggatttaacgttcgtccaacagctcaagcgcgtgaagcagcagaaaacgaaagtgtagacattcgtttacaccgtgttatctataaagccattgatgaaattgaagcagcgatgaaagggatgcttgatccagaatttcaagaaaaaattattggtcaagcgcaagttcgtcaaacaatcaatgtttctaaagtgggtacaattgcaggctgttacgtaacagatggtaaaattactcgtgatagcggcgttcgtattatccgtgacggaatcgttgtttttgaaggcgaaattgctacacttaaacgctttaaagatgatgcgaaagaagttgccaaaggttacgaatgtggtatcacagtacaaaacttcaacgatatcaaagaagacgatgtcattgaagcttacgttatggaagaaatcgaaagaaaatgattcaatcagttgttagtgaatttttcatgcaggaaccacaaaacctcaaagaaaaacgagctatcctgaaacgaattataacgagagcaaaacaaaaattcaatatctctatagctgaaacggattatcaggatttatggcagcgagcggaagttagctttgctgtcgtatcttcctcgcacatccaagcggaaaaagaagccagagaagtacttgcttttcttgattcttttcccgagtgggaacgcgccgagactgttatggagaagttataaaaagaggtgaatacacttgaacgtacgagcaaatcgtgtcagtgagcaaatgaaaaaagaattgggcgatattttaaatcgtaaaatcaaagaccctcgcttaggttttgttactgtaacgggagtagatgttactggggacttacaagaagctaaggtgttcatttccattcttggtaccgataaggaaaaagaaaatacgttactcgcacttgcgaaagcgcatggctttatccgctctgaaatcggtcgccgtattcgacttcgtaaagttccagaaatgtcttttgaaatagataattccatcgcttacggaaatcgaatcgatgaattgcttcgcgacttaaataacgatcaataataaataaaagtttaaggcagtccctttatcttctcattcaaacgggatgtaagtgggggaactgtcttaaactttttttcttagaaggaggagctcgatgaacggcattatcccactgtggaaagaacgcgggatgacaagtcatgattgcgtttataaattaagaaaaattttacatacgaaaaaagttggtcatacaggtacacttgatcctgaagtagaaggcgtgctaccaatttgtattggccgtgcgacaaaattggctgaatatgtcaccgatgaaggcaaagtctatgtagcagaaataacattaggcaaatcgactacgacagaagatgcaactggtgaaacggttaatactaaagaactagccgaaatttcggcggcagaacttcaagccgcgcttactaaactaacaggtaagattacccagattccaccaatgttttccgctgtaaaagtcaatggtaagaaattgtatgaatatgcaagagctggtatagaggtagaacgaccatccagacaagtggatatttattcgttaatccgtttagatggcgacacagcgctaaatcaatccaacccaaccttccaattagaaattgcgtgcggaaaaggaacctatatccgtactcttgcagttatgattggcgaattattaggttatccagctcatatgtctaaactagaacgtactcgtagcggctttttcaaaaaagaagattgtttgacgctcacagaaattgacgaaatgatgcaagcaagtgatagcagctttttatatccacttgaaaaaggaattgaatctatggccaaactagtaattgaggaagaagtatacgcaaaagttttgaatggcggccttttaccaacatcgttatttgcagaggtagaaaatgaacctcgtgctgcgcttatttttaaagataaattaacagctatttataaaccacatccagagaaaaaagacctttggaaaccagaaaaggtcatcgagttaaatcaagcatagttattgcgaccatagctttcttatattatgatatgagaggaattcgaatttagaggagaagtggcaaaaatgaagacgatatacttacatcatccgattacaacggacgagtggactgacataaacaaagtaatggcacttggtttttttgatggcgtccatttgggacatcaagcagttattaaacaagcgaaacagattgccggacaaaaaggacttcaaactgcagtgttaacctttgatccgcatccatctgtggttttaagcaatatacgaaaacaagtaaaatatctcacaccacttgaagataaagcagaaaaaatggctaaacttggcgtagatattatgtatgtagttcgctttacaacacagttttccgagctatctccgcaagcctttgtggataactatttagtcgctttacatgtagaacatgtggtagctggtttcgactattcttacggtaaaaaaggtgaaggtaaaatgaccgatttggctaaatatgctgatggtcgctttgaggttacgattgtcgataaacaaactgccgcaagcgacaaaataagttcaacaaacattagacgtgccatcacagaaggcgaactagaagaagcaaatcaattactgggctatccttatacaacgaaaggaaccgtgattcatggggacaaacgcggcagaacaattgggtttccaacagcgaacatccgcgtaaatgaagattatttgattccgaagcttggtgtttatgcagtgaaattccgtgtgaatggggaaactcacttgggtatggcgagtattggctataacatcacgtttaaagatgaccaagcactctctattgaggtgtatattctagattttcaccgcgaaatttacggagaagaagcagaaattaaatggtatcaatttttccgcccagaacttaaatttaatggtgtagaaggtttgattgctcagttagaaaaagacgaacaagatacaagagctttttttgctaaattagaagattaaacgactatttctgcttgcttttagagcctaaatagtgtatctttaaatctgtacgaacagaaccattacttggcttttgcgactcaccgacgcttggctcagtaattggggatattttagaaggaggtggaaagaaatggctttaactcaagaacgcaaaaatgaaattattgcagagtaccgtgtccatgatacagatactggttcaccagaagtacaaattgctgtattgactgctgaaatcaatagcttaaatgagcacgttcgcgtacacaaaaaagatcatcactcttaccgtggattaatgaaaatggtaggtcaccgtcgtaacctattaacttacctacgtaaaaaagatgttcaacgttaccgcgaacttatcaaacgtttaggtttacgtcgataaaaaccagacgaaagcgggataccaaaagttcccgcttttttttgagtattaactatactaaattttggaaaacacgccgaagaaatgaaactttatcgcatgaatccaaaaacgtgcttcaaaaatttgctatttttagcaggtttttggattcatgtgtgctttagacaatctaaagtgtgcgtgaacattcttatgcatggtaaagtttctggttcgtgtttttcctaatcaaaggagagtaaaatatgtctgaaaaacaagtattttcaacagagtgggcaggtaaaacattatctgttgaagtaggtcaattagcaaaacaagcaagtggggcagccttaattcgttacggcgatacggttgttttaacagccgcagtaggttctaaaaaaccacgtccaggcgactttttcccattaactgttaactatgaagaaaaaatgtattccgttggtaaagttcccggtggattcttaaaacgtgaaggacgtccaagcgaccgtgctacattaacagcgcgtcttattgaccgtccaatccgtccgctatttgcagaaggtttccgtaatgaagttcaaattacttctactgtattcagtgtggatcaagattgttcgccagaaatggcagcaatgcttggatcttctgttgcattagttatttccgatattccatttgaaggaccaatcgctggtgttgacgttggtcgtatcgatggaaaatacgttattaacccaacaatcgagcaagcagaaaaaagcgatattagcttaactgttgcaggaacttatgatgcaatcaacatggtagaggctggagcgaaagaagtttcagaagaagcaatgcttgaagcaattatgtttggtcatgaagaaattaaacgtctttgtgaattccaacaacaaattattgcggcagttggtaaagaaaaacgcgaaatcgaactttttgtaagcgatcctgaacttgaagcagaagtaaaagcagctagtgaaggtaaaatgaaaacagctatcaaaacagaagagaaaaaagcacgtgaagctgcaattgaagaagtaaaagaagaaattttagaaagctataaagcaaaagaattagaaaatgaatctgaaattcttagcgaagtagctcatattcttgaaatgattgaaaaagatgaaatgcgtcgtctaatttctcaagataaaatccgtccagatggtcgtaaagtaaacgaaattcgcccgctttcttctgaagttggcatgcttccacgtgtccatggttctggtttattcactcgtggccaaacacaagctctaagcgtgtgtacactggcaccgcttcgtgaacaccaaattattgatggtctaggaacagaagagtacaaacgctttatgcaccattataatttcccgcaatttagtgttggggaaactggccctcgtcgtgctccagggcgtcgtgaaatcggtcacggtgcattaggcgaacgtgcattacaatatgttattccttccgaagaggaattcccttacacaatccgtttagtatcagaagttcttgaatctaacggatctagctctcaagcaagtatttgtggttctacacttgcaatgcttgatgctggtgttccaattaaagcgccagttgcaggtatcgcgatgggccttgtaaaacttggagatgactacacaatcctttctgatatccaaggtatggaagatcactttggcgatatggactttaaagttgctggtacaaaagacggtattacagcacttcaaatggatatcaaaatcgatggcttgagccgtcaaattttggacgaagcattaacacaagcaaaagaaggacgcttacacattctagaacacttaactagcacaattagcgcacctcgtgaagaactttctgcttatgctccaaaaatcatcacactaaatatcaaaccagagaaaatcaaagatgtaatcggaccaggtggaaaacaaatcaatgcaattattgatgaaactggcgtgaaaattgatatcgaacaagatggtacagtgtacattgcttcccaagatcaagcaatgaaccgtaaagcaattgctatcatcgaagacatcgttcgtgaagtagaagtgggagaagtttatactggtaaagttcgtcgtatcgaaaaatttggcgcatttgttgaattattcaaaggtacagatggtttagttcatatttctgaattagcgcatgaacgcgttgggaaagtagaagatatcctaaaattaggtgatgaagttactgttaaagttatcgaagtagaccaacaaggccgcgttaacttatcacgtaaagctttgcttgagaaaaaagaacaaccagaaggcgataaaaaaccacaagcagagaaaaaattctatccaaaaacgaaaaaaccagaatctaaataatataaaaagcaagtagcttaggctacttgctttttttaaactattttttaggtcgggttttaaaatgtgttcgcattgatttttgaataactttccagcggtcgcgttcttgtcttgcaagagcagggctatttttccgggcgtggtaagccatttctcgctgcaatttcaaccaattctcgtaatgttgcatagtgagagttccatcttctaatgccgcttggacggcgcaatttggctcttgtgtatgagaacaatcatggaaacgacatccttcagccaattcttccacatctgaaaaagttgtttctaatccagcttgattaaaaccaacaccaaattcgcgcatgcctggcgtatcaataacaatccaaccattcgaaagcaaatgcatttctcgatgggtcgtcgtatgttttcccttactatcatcttctcgaataccagcagttttcattaaatcagtacctgcaagcgaattaataaaagaggattttccaacacctgaggagccgagcaaaataagcgtgctattcggctttaaatcactttctaacgcttcaaaaccatgatgtgataaattatccacatagtaagctggaacgccataagcgactgcttcgagctgctgagcatagaatgataaatcctccactaaatctgctttcgttaaaatgataatcggtgttgcaccactatcccaagcaacagttaaatagcgctctaatctgtttaaattaaaatcatgatttaaactcatcacaatgagcgcataatcgaaattagctgcaatcaattgttccgccgagtctttattcattctagaaaatactgttttccgctccaaaacagagagtatttgcaaatcaccactaatctctacaaaatcaccgacagtaggaagagaagtagaggataattcataaaaatttccacgcttcaatgatgctaaaaattcctcattctccgtaataacacgatagtaatctctaaataccgcagttactctaccataagaggaagtagcagctatcttttgttctttaaaaaaacttgtaataccatattgttctaatatcaatgttttcgctcctttgtagttgggagcattctataggtaaaatacccccgtattaattatgaggttttccatttttacaattgccataattcatcatcctttctttcttaaataataacataaaaaaggaaacaagctctagacttgtttcctttttgtattaatttttatgcgttaaaattttagcaatcgtttcatagctcatatcacttttgagattatagctaccatcacgaatatacttttcataatcattatctcgtaaatatttatcaaaatctgaagcacttttaataataccgtttgcttgaagttcgtcaccagctttagaagaaggatctcctttagaaatctttaaagtataactttttactttttttgcttcttcagctttctttttagcatcttcttcggcttttttctttgcttccgcttccgttgctttatccacttcttgctgagctaataatttttcgtatttgttcttccatgtgcttgagttttcatcagaaccagcttttgtagacgtggcttttgtttcatctgctttagtctgagttgagaaaaactgattatacaccagtaagacaacagcagatattaagaaacctagcgccaacatccgtaagtttttcttcacagataggctcctcctttaaaatttaaatcaatgttttaaatattcttcaatgattttttccacttcttctttaggtaaagatgactgttcagcaatttctgaagttacaattccagaagtataaagtgtaatcacttgttttttcattaattcacgaactttcgggctatcaggaacttgctcagcttcaatgcttgggctatccattttcattgctttttctagttcagagatacgttgttttagttcaaagttttcttgcatccactgagcagcaacatcttccagttctttttctaattgtttattgtcacctttttgtagaaatgaaataacaaacagcgcaatagcagcaattagtaagataattatgactgtggtcatgggttttatacacacctctcttccataaactctactactagttatagcataatttacctcaaaacaccatccgaaataaggttttgtaaagaaaataaaaagaaaatgcatagagtccttgcaacaactgtttaaaaatgatattattatacaggtttagtaaataaattcgtcagtcggagttggagggaaaaataatgcgcgttaatattactttagaatgcactgaatgcggtgatcgtaattacatcactactaaaaataagcgtgaaaatccggaacgtattgaattaaaaaaatattgtccaagattacgccgtgtaactttacaccgcgaaactaagtaagcagcaggatctccattctgttgctttttttattagacaaaagggggaagtcaagatggaagacaaacgactgatacgcgagaaaattctacggaatttgaatagcattgataaagtagaacatcgcgaacgttctattaaattagcagaaaaactatttttattgccagaatgggaaaacgcaaaggttgttggtatcacattagcaagacaccctgaaatcgaaacagaagcaatcattctgcaagcgaaaaaagaagggaagactattttaattccaaaaacatattatcctagcagaaaaatggagtttaaaaagatggattccatacaccctttaataaaatcaaagtttggtattttagaacctaacgaattagcagaaacagttgataaaaaagtaattgacttattaatcgttcctggggttgcttttaataaagaccattatagaatcggttttggcggaggattttacgatagatttttaacggattttcaaggccatacagtgtccttgtacctttatgaacaacaaatagagtttacacctgaaacgcatgacgaacctgtttctattttaattggaggataaggaaaaataattctatagaaaatagggtggattgtttacaacacccttttttttgcgtatagtagtaaatataatttgtaatgaaagcagggaattttttgagcttccaagaacaatatgtcttctggcgcctaactaattatttcttgggtgttgaaaaataccgtctaatccatcttcacgaggagaaacaagaactttggttggaaaatacaagccagaaaaaaagaccagtcatccgtatacagatgaaagaattaagttgggctaatgtggtggaacgcgatgtgacacacactttacatgttactgaaaatcttcgtaagcaaatggggcgtttgaaattgcctcttgtgaatatttatataacaccatttgaaccaatgggtgatatttcgcctttttttgggcagtcaattgcttctccaaatgaaaaagtgaaattagaaaatattttactcgcgaacgaacaaatgagagagcatctagatatactaattaaaactttagaattaccagaagaagcatttgttcttccaaatgaaataacgaaagagctagtagcaaaagagcgagagcaagtaatcgcgtatattactactaaagtaaatgaagaacaaaaagttgctaggaattcaaaaccaatagttacgtatacgttcattggccttttggttgcagcattcttgtggctttctttccaaggtggaactaccaattcatttaacttaattaaatggggcgggaaattcaacccacttatttatgctggggaatggtggcgctttatttcaccgattttccttcatagtggattaatgcatatagcttccaatgcagttatgctatatattgttggtgcttgggcagagcgtatttatggtaaatggcgttatgttctaattcttctcttaggaggaatatgtggaaacatagccagttttgcactaaatatgaacttatctgttggagcgagtaccgcagtatttgcagtaatgggcgcattactttatttggttgttttaaaaccaaatctttatgcaaaaacaattggcgtcagtatcgcgtcacttgtcgcaatcaatttgttaattgatgtattttctagccagattgatattgctggacatattggtggccttgtaggtggattcttgcttgccggagcattatcgttaccaaaacaatttttccattggcgacgacttgcatatggcatttcactttttgctgtagctgttttatttttgtattttggctaccaaaaaggagaacagccatatgatccgatgcaagctaatgtagcagtacaacaataccttcaagaacaaaacaaaaaagaagcaacgaagattaccgataatttaatttctagcggaagtgctgacggctattcatatacgtatgctgcatctatcgctttacaagataagcaaatagataaagcagaaacaatggctaaagaagcaattaatatcgacaaagacatcccagaggctcattattatttatctgtttgctatagaataaaaggcgatatgccaaatgcaattaaagaagcgaacagcgctagagagttatcaagcaatccattttttgattcttattacgatgagttagaaaaaatcaaagaataagaggtttttaatgtgaaaacagtttatgatgttgcccaattactaagaaagcatggcattattgtttatttaggaaaacgacaatatgacattgaaatgatggaatatgagataacagaactttttaaacataatattttagatagagaaacttttgctagagctagaagtatattgaaacaagaattaatcaaagaacaacgaaaaaatagtagtttaaattaaattgattataaggagaacagcagaatgaacaaaaaattaattggtgtagatttaggcgggacaacagcaaaattagctattttaacaaaagaaggcgacattgaggaaaaatggactattgatacaaatattgaagataaaggcgcccacattgttaaaaacattggggattctatcaatcaaaaattaacagacttacaactagataatgatattttttacggtattggtatgggaactccaggtactgtaaattatgaaacaggtactgtaaaaggtgcgtacaacctagggtgggcagatgaacaaaatgttagtcaagatttagaaaatattactggtttgaaaatcatattagataatgatgcgaatgttgccgctcttggcgaacgctggaaaggcgcaggtgaaggtggcgcgaatgttgttttcgtaacacttggaacaggcgttggcggtggtatttttgcggaaggtaaaattttacatggcatccgcggggcagcaggcgaaataggccacgtaacagtagttcctgagaatggttacgattgtacttgtggtaaaaaaggatgtctagaaactgtcgcatcagcaacaggaattgttcgagtagcgaaagatttagcaaaagagtttactggtaaatctgcgcttaaagatgcaatagacaacaacgaaacgattacctccaaattgatttttgaactaggtgcggaagatgatgcattagcgaatgaaacaattgataaaatttctttctatttggctttagcgcttagtcatattggaaacatgttaaatccagagaagattattattggtggtggagtttcagcagcaggagatcaattattgacaccggttaaaacttattttgaaacgatggttttcccagctgttaaagaatccactaaattatctattgcgacaaaagggaatgatgcagggataattggagctgcgtggttagcactaccaagtgaagattaatattaatttgtataagctacaataacactccattattgtagcttgttttataaagctaatctttctataacgcattgttttagcttcctttgaaaagggtaaaattttagcatagagagattggaggccagagatgaaaaaatcaaatacttttttgctgattaccatattagtcggattggtttttatctcttttggttgctcggaggaaaaagaaacaccaaaaaagactgcaaaagaagtgcaaggtgttcaaatcaaaacaaaagaattccagcgggtggtcggttggctgtcaaaagattctgttttactgcaaaccaaaaaatctggagttacgtattttgaagaattgaatatttacaatgaaaagaaaagaccaatctttaatacgaaggaatctatttctgaagtccaaattagtccagattatcgaaatatcttactttattctgctgaatcagctgaaaaagctacgatgcgaataatcgctttgaatgatggttcaactgttgcgtctcgagcaacaaaacctctaacgacgacattttattggaatgacgaatcacctgaaaaaatcatgtttgtcacatatagtccagaatggaattttcaaatagaaaactgggattatacattggatcaactggataaaatagatgtcgcatcaccttttatttcctggtacggagataatttggtgatttcaaacaataaagacaaaccggacgatgaattaggaaacctttatttacaagatattagagatagcgctactaaaaatttaattgtagctaatattatgcaatttgctgttcatgataatgtactgcttactattgaaaaaaactctgatgaaaaattattatacgattttagaacacttggctttcaaaatttcttttcgtataatgctgctcgagagtatgatgaattagggacttttgttccgtattttgatacaaattttgataagaatacttttctaacatttgttccatataaaagcgctaaaattggcagcggagcaaaagagtataagttagtaaaaattgatccaacgaacaaaaaagaatcgactatcttggaattaatggataaccaacctattttatcttatgaaacaggggatttagttctctatggttatttatttgataaggtaatcgatacgaaaacaggtaaaatgtataatttaattaatacaccaactaaatctttttaaaacaacgagttccttctttaagggctcgttgtttttgttaatgtatagccgttttctagtgtgatttgacagttgaattctgttagttgattatccgtcgcctggcaatctatctttgtgcctttgtaatttgttttaaactgatatgaaagtgaagatgtttccttaatttctatgaaagctaaatttagtttagtggaggctaaataataattttgaatcattttttcatattgtatttgtgtcttaaagatagaagcactaccagtaacgattaaaattgaaataagcgcaatgaaaatggtaaatgggagcgtaaatgcattagtcttcatggattggataccacttctggtaatgcgaatacagatgtatatatctgagtattagagtcttgcaccgttaaatgaagttgtttttctttcttgattaattgataatctttcacattagtaagcaatggttcatgtccttttccgtttacttgtcgtcgaactaaatcattatatttggaataggtgataaggtctttgccattactaaaagaaagcttattcccatcaatttgaatattagtcgctttttctaattctaaacgagtttgaatgagaaaaagttgccattctgttgtctggtcaatgttgctaagttggatagtcttgttgtagcattgaaaaaataatggaatgagcaagctaatacttaaaatgattgtaatagacaagattgtttcaagaagagtgaaagcaggtgagccgcttctaaaagatacatttttcttccaatttatttgttgcacaaatttggatacctccttgataatggaaactttggatacgttcatccttaaagttaaccggaacatttttgtggcgtaatagttcgctatgttcataaatttcttgatagactctgctagtttctttttgatggtctagtttttcaaaaatagtcatagctgtgggtaatagaaaactacaaaccattgcgaaaaggagaagcgaaaccatgctttcgactaaagagaatccgttaattttgttcaattctaaaacgcccctttccgatttgaaatattagcttgtagttatttgtcgaacttgtcaggtggattgttgaaaaacgattaatggatccatctgtactcgaaaaacgaaaatttcttatttttggctgtgttaaagttaacgtctgtgaaaatggaatgataacaagtgtttttgagttagtatatgtgatgagttgatttttcgtaggatcaaatgaaataaacgtatcttgatttgttgctacagcatttatttgtgcgtagtaaatgctggcttttatttcttctagtagttgcttttccctaagagtggataatgtacttgaaataggaaaaatagttagtgtgattagtgtgaaactgatagttagtacaagtaacatttctaataaagtaaatccatttattttcattttttctcagaaacatttccagagctatctattttgatgctattcccattagggcacgatttttggttagcttttagatagcctccacttactaaatcagctacagaagggattgaatttttatctaattggtaggactgaacttgaccttgaaccattgatataaaggcctcacatcctttatcgttgattgatttactttgtgatactatgtttggaatagtaaggagtagcaaaacacttaccactaataaaacaattaacatctccaccaaagtaaaacctcgctcatctcgccaatcaattttctttttaaacattaaaactcctcctttaaatttgatttaccatagaaaacatgggatataagatggatagataaatggatacaattaaaataccaataacgataaaaacaattggttgaataaatgaaaataatttttcggtcttttgaagtgatttctgatgacataagttataataaaataaaaattcttctgctaaattaccatttttttcaccgtggatagcaatataataaagttctttttcaaatataggcattttttctagtgcttttgttagtgataatccttgttcaagcgtaggcagaatttgcctggcgatttcttgaaagaaggcgggagattcttcttgtgcgaacagatgcataatatgcgttatagataaaccgcttttcagcagatatccgagttcacgcgaaaggtattgtgaataatgaattcttgaaaattggcgaatatatggaattcgacaataaaaataggctcggtcataagcatttttttgcttttgctttcgaataatgaaactgaaaatcagaaaaaggctaagtaaaaaaattcctaataaaattggaactttttcaagcaggaaataagtgaaattagttccgactgtgccgttagttgatagttgtgtaaataaaagttcgaatttaggtaagagaaaaattcgaagcaaaaagaacacaagaataactgtagagaataagactagtggatattggaaggtcttcattaatgcgtttttttcttcagcttttcttttcatatgaacgccggtttcgtgaattgtttgcaaaaagtaaccgtgactagaagcgtaatggagttgtgaacaaataaagtcaggaaatccgttttttgaaagagcataggaaaaagaatttccatttgctagtgaagtgataattcgttcatatcttttgcaatatttgggcgaagtaatgcttaaataactaatggtcgcatctaaggagaaccccttttcgagtaaacttgcaactctaattaaaaattctccgtcatctttccaattagtacgctgaaaaaaagccataagaaactcctttctcgaaggttcttttaatagggtatttaggctcaatctgctgttgattagattggaaataggcttttatatcttgttttgtaagaacttcatagatagctgttctttttcggcgtaaatgtgtacaaaggggatggcatttttctccgcagaaggcgcaaactaggagggtcagtttctgaaaactgattccgagtaagcattgcgctaattcctctgagctaataccgaattcaagtaatcttaataaaactccatacgcatctccggcatgaacggtgcttaaaactaaatgaccagttaatgcagcacgaataactattttagcagtttctgcatcgcgtatttccccgatgattaaaatatcaggatcatggcgtaagacggagcgaatgatgggcgcataggtgatgcttgctttttcgttaacttcgatttggagaaagccgggagaataatgttcaacaggatcttcaattgtaatgatttgcagttcatctttattttctatagaagaagctaggctatacatagaactagacttaccgctacctgtgctaccagaaaaaagaaacaagcctgtttggtttttacactgttgttgaatttgtttagtggacctaggaaatacacttgaatttaaaaatgggatagggtgcttgtaacgaaaaattcgaataaccatgctttcatggaaatctttgctgggcatagtagaaagtcgtaaagcaattttttctgtgtttgtatttttttcaaaactaccggattgaggtcgtcttttttcgcttatatccaaagctgcttggaatttaagaaaagatattaacttttctcctacatctattggaaggtaaagaagtggaattaatgtcccatttacccgaagacgaagtaagtaacggtttgaaagtggatgaatatgaacatcgctggcattgatacgtaaagcttgggttataatgtgttctgtcattttttgcggcataagaacctccttacaagtcatattcttcataagcaaataaaatcctttgcgctccaatctttcacaaaaacgaaaatagtattttctaaatgcaaaagtaacatttcaaggcaaaataacattgaaagtgatattttggaagcaaaaaagtaaataaaataatttttttgatcttgagtattttcacaatgtatgtgcaatggataacaaacgtataattaaactaaaatataacgataaagcccttacattccgaaccaatatcaaaaataaagaaattttcacctttaaaactaattatttgccgaacaatacaactcatgataagctatagaaaaggcaaatacataatagaattagcgggtgaatgtaagcagagagactgcgaaaagcagcgccgacggggaaagcatatattatgtgaaactctcaggcaaaaggatgtttacgggacgcaactctggagtcatttttgtgttacgacagggcttatgaactatataagcctttttgttatgtgaaaaaggaggatataattatgacagagctactaaaaacaccgattcatccactttatgcaaaatatggtgcgaaaaccattgattttggtgggtgggatttaccggtacaatttgctggtataaaagcagaacatgaggccgtgcgaactgatgcagggttatttgacgtgtctcacatgggagaaattctagtaaaaggacctgatagtacttcttatttacagtatttgttatcaaacgacatagaaaaaataaaaatcggaaaagcgcaatataatattatgtgctatgaaactggcggaacagtggacgatctagtagtttataagaaatcagaaacggaatacatacttgttgtcaatgcagcaaacacggacaaagattttgaatggatggttaaaaatattcgcggggatgtttctgttaccaatgtatcttcggaatatggacaattagcacttcaagggccaaacgccgaaaaaattctctcgaaactaacggatgtagatttaagctcgattagcttctttggatttgtggaggatgcggatgtagctggagtgaaaacaatcatttcaagaagtggatatactggagaagatggatttgaaatttatatgccaagcgcagatgcaggaaaagtatttgaggcgattttggctgaaggtgtcgctccaattggtttaggcgcacgggatacattgcgtttagaggcagtacttgcgctttatggacaagaattaagcaaagacattactccacttgaagctggcctcaattttgctgttaaattgaaaaaagaagcagattttataggcaaagaagccctaattaaacaaaaagaagcagggctgaacagaaaattagttggtattgaattaatcgaacgaggtattccacgtcacgattatccagtatttttaaatgaggaacaaatcggcgttgtgacttcaggcacgcaatcaccaacacttggaataaatattggtctcgctttaattgatacagcttacacagaattgggtcaagaagtagaagtaggcataagaaataaaaaagtaaaagcaaaaatagtaccaacaccattttataaacgcgcaaagtaaaaaggaggaagtaatatggcaaaacatcgttatttaccaatgacagagcaagatgaaaaggaaatgcttgatgtaataggggttaagtcaattgatgacttatttcaagatattccagaaaaaattagatttaaacgagattatgatttaaaaccagcaaaatcagaacccgcacttttacgcgaattatcgaaacttgcttctaaaaatgccaataccagtgaatatgcgtcttttttaggggctggagtttatagtcattacattccaaccgtagtggatcacgttatttctcgttcagaattttatacagcatatacaccttatcagcctgaaatttcgcaaggagagttgcaggcaatctttgaattccaaaccatgattgcggaacttactggaatggacttggctaattcctccatgtatgacggtggaacagcacttgcagaagcagcaatgctagcaagcgggcatacaaagcgtaaaaaaattcttatttccggagctgttcatccggaaagtagcaatgtattaaaaacctacgcaactggtcaacacattgaagtagaagttattccagaactagatggaaaaacagatatcgaggccctaaaaaaagctctttcagatgatattgcgggttttgttgcacagtatccaaacttctatggacaagtggaacctttggcagaacttgaaaaattagtgcatgaaaataattctttattacttgtatcgagcaatccgttgtctctaggattgttaactccaccaggagaatttggtgcagatattgttgtaggcgattcgcaagtattcggtattccagaatcatttggaggaccgcattgtggattctttgcagtaacaaataaattaatgcgtaaagttcctggacgtttagttggggaaactgtagatgaaaatgggaagcgtggttatgtattaactttacaagcgcgcgaacaacatatccgccgggacaaagcaacttctaatatttgctctaaccaagcgctgaatgcattagcttcttctgtcgcaatggcaacccttggaaaaacaggtcttgtagaaatggcaaaacaaaacctagataaatctcactatgccaaacaaaaattccgtgaaaaaggctttgaagttctattttcagatggttttttcaatgaattcgttgtaaaactttcgaaaccaatcaaagaagtgaacaaatcacttttagatgaagggattatcggtgggtatgaccttggcttttacgaggaaaaatacaaacatcatatgcttgtagcagtgacagaaatgcgaacaaaagaggaaattgatgcctttgtggctagcttggagggtgcaaaatgaatttagaagaaacgatgccattagtgtttgaacgttctattccgggaagaattggctttagtttgccagaaagcgatgttccagaaacaaatgccggtgattattttgatcaagcatatattcgttctataccagcagatttgccagaattaagcgaacttgaaatcatgcgtcattataccaatttatccaatcataattttggtgttgattctggtttttatccgcttggatcttgtacgatgaaatataaccctaaaatcaatgaaaaagttgcacgttttccaggctttgcgaatatccatccaaaccaaccagaaagctcagtccaaggcgcactagaactactatatgatttacaaacaagcttagttgaaattacaggaatggatgaagtaacattacaaccagctgctggagcacatggagaatggactggattaatgctcattcgcgcgtttcatgaaaaaaatggtgatacaaaacgcacaaaagtaatcatcccagattccgcacatggaacgaaccctgcatccgcagctgttgctggctttgatgttgtcacggttaaatcaaatgaaaaagggcttgttgatgtggctgatttgaaaaaggtagtaggcgaagatacagccgcattaatgctcacaaacccgaatacactcggtcttttcgaaaaagatattgttgaaatggcagaaatcgtccatgaagctggtggtaaattatattatgatggcgccaacttaaatgctattatggcaaaagttagaccgggagacatgggctttgatgtagttcatttaaatttacacaaaacatttacaggtcctcacggtggtggcggtcctggttctggcccaattggcgtgaaaaaggaattaataccgttcctaccaacaccagtccttacgaaaaaagaagacatttacacatttgattacaattatcctgactctattggacgcgtgaaaccttattatggtaactttggtatcaacgttcgcgcgtatacgtacattcgtacaatgggcccagatggcttgaaattggtgacagaatatgccgttttaaatgcgaactatatgatgcgtaaattgcaagaagcttatgatttaccatttgatcaagtgtgtaaacacgaatttgttttaagtggtaatagacagaagaaacttggtgtaagaaccgttgatattgcaaaacgattgctagatcataatttccatccgccaaccgtttatttcccgctaattgttggtgaagcaatcatgattgaaccaactgaaacagaatcgaaagaaacactagactctttcatcgatacaatgttaaaaattgctaaagaagcagaagaaaatcctgaaatcgtccaagaagcgccccatagcacttatgtaaaacgactagacgaaactcgtgctgctagaaaaccgattttacgttatcaaaaagaagtataaaaagaagccttgctgcgaaatttcgtagcaaggctttttttatttagatttagtttttcctgtccatttacggtagccgcctttaagctgatacacttgtttgtagccgcgtttataaagcataattgctgcacggttactacgttgtgctgtttggcagtataagtaaactggtaaatcttgacgaatttctgttgtccggtttttcatttgtgtaactgggatatttctagctccaagaatatgtccagcatcgaattcatttggctcgcgaacatcaattaattgtgctttacgataaccttttttaaattcttcttctgttaaaacttttactgctttgcgtcgcattacaaactggtaaatttcgtatcctaaaagaataaccagaatgataattgctataatccaactaatcacttgtgtagacccctttcatcctgaaaactgctttttttaaagcatacttttctattataacttattttttgccaccatcaatcactttgaaggaagattttcgttttttctttgtttttttcttcgggttatgcatgtttttcgattgtttcaccgctttttggtaattactgtcagtttttctattcgtgaaaagtcgcagtaggagggtgaaaataagtgtcccaattaaaacggagacaatcaggatgaaaaatgatttaaaaccacccattaaaagccctataccaacaagtgctagtaaaacaatagcaatgaggggatacttcttcaaattaatccactcctattctaaaagttccagattatccggttcaactacatctattggtgcaccttctttttccactcgtaaaagctcattaaaggatgcaatggcaacctcaacttgatcatcggacggttcttttgttgtaagaagttgtagccataaccctggaacgcctaaatatttaaggacagggatatttcgacatttattagttaattgaagtacctcaaatgctacaccaagcacgacaggaataagcaaaatccgatcgaccactcgaagccaaagagggtcggttggtactaacaaataaataaacataccaacaataaccgtaaataaaataaaactgctgccacaacgataatgcagtcgcgattgtttttgtacattttcaactgttaaaggtaaattttcttcgtaacaattaatcaccttatgctcagaaccgtgatattgaaaaactcgtttaataataggggtctgagaaaccgcaaaaatataggttaatagaagaattaatttaaaaagactctctaaaaatacttgggccgtatcacctggaacgattggacggaataattccgctaaaaacacagggatgagcgtcatgacaaatttagcaaagacgaaagataaaataccgatgacggcaacgccaagccacatcgcgactttcgattcttttttttcaattttttcttcttctactggattatttggatcttcgtcatatcggtctgttgcaaaagcgaggtgtttggaaccgatagcgctagattcaattaatgcaacaattcctcttaaaaaagggattttcttcatacgcataacccaaactggactatttttttctaaataaaaatattctaatgaaccatctatacgtctaatcgctgttacggtctgttttctgccgccaaacatgacgccttcaactacagcttgaccgccatatgatggtacgttttgtttgctcaaagttttcaccagcctattcatgtttactaatatgttattttacgctaaaaatagtttttcgtatagcgcaaaacgcctaaaaaaagttattttttctaaattgtgataaaatagtttcgaacgtgtctaataatgcgatttttgcgcgactaaaatttgataaaagtgggggaataaaaatgtctaaattaactaaaattcaagaaacgcttggcaaggaaaagatagaagcagttcttgtcacaagtgagtttaatagaaggtatgtatctggtttcactgggacaagtggtgtggcgctaattttacctgaaaaagcttattttgtaacagatttcagatatacagaacaagcagcaaaacaagcagaaggatatgaaattgtacaacatactggtccaatttttgatacagtagaagatttattaattaaaaacgatacaaaaacactacattttgaagcggattatgtgactgtatctgaatttaaacaaatggagcgcgtatttaatcgtcaattaatcccacttactggcttctttgaagaaatgcgtaaagtgaaaacagcgagtgaactaaaagcaatccgcacagcttgtgatattgctgatgcagcttttgcacatattattcaatttattaaaccaggtatggctgaaatcgaagtatctaatgagctagaattctttatgagacgtgctggagctacttcctcatcgttcgatacaatcgttgcatccggaattcgttctgcattaccacatggggttgcttcggataagaagattgaagttggcgatttcgttacaatggattacggttgttactatgatggttactgttcagatatgacaagaacaatcgcggtcggtgaacctgctgaaaaattaaaagaaatataccaaatcactttagatgcccaattgaaagtaattgatagcttaaaaccaggaatgactggaattgaagcagatgctattgcacgtgattatatttcttcatttggatatggtgatgcatttggacattctttaggacatggaattggacttgaaattcacgaaggaccaaacctatcctttaagagccctcaaaaactggaagttggacatgttgttacagatgaaccaggaatttatttaccaggaatcggtggagttagaattgaagatgatctattaattacagaaacgggtaacgagattctaattcattcaccaaaagaattaattattttataaaattcctttgtaactttgtgcgttttatggttaaataaggaagaatgagcagttttaatatgctccaaataaagatactttgcaaattacaggaggaaaaacatgatttcagtaaatgactttaaaacagggttaacaatagaagtagataatggtatttggcgtgtgctagatttccaacatgtaaaacccggaaaaggagcagccttcgttcgttccaaattacgtaaccttcgtacaggtgcaattcaagaaaaaacattccgtggtggcgaaaaagtagcaaaagcgcaaatcgacaatcgaaaaatggcctatttatacgcagatggtacaaatcatgtattcatggataatgagtcttatgaacaaattgaacttccggaagaccaaattgctcatgagcttaaattcttaaaagaaaatatggaaattaatattatcatgtatcaaggggaaacaatcggtattgatttacctaacacagtagaattagttgttactgcaactgatcctggaattaaaggtgatacgtcttctggtggttctaaacccgccactcttgaaactggtcttgttgtgcaagtaccgtttttcgttaatgagggagacaaactagttattaatacaaccgaagcagcgtatgtttctcgggcgtaagcaagaatcgtttactacagctggagttaattcttcagctgtttttctatttatcagcgcttccagtacaccttttgaataaaaagtatggtacaataaggacaatgcgtgattcatgcaattttttatttttagtattattaaggagtgtaaatggtatgttatcaatagatgaaattaaacagctaatcgagctgattgacgagtcaaccctagatgaatttgagttagaaacgaaagatagtaagattttgcttaaaaagcataaaacagttgttgctacagcggtacaagaagctccaattgctgtcacaccagcacaaacagcgccagtaacaccagcagccgctcctcaagtagaagcaagtacagctgaagatgtgaacctggaagtaattacatctccaatggtcgggactttttatgcatccgcttcaccagaagatgctaattttgttagcgttggctctaaagtatccgcgcaatccgttgtatgtattgtagaagcaatgaaattattcaacgaaattactgctgatatcgatggagaaattgcagaaattcttgtttcgagtggtgaattagtcgaatttggacaaccacttttcaaagttagaaaaaaataaggggtcgaaaaacatgattaaaaaagtactggtagcgaaccgtggagaaatcgctgtccgtatcattcgcgctgcaaaagaacttggagtggagacagtggcgatttattcggaagcagatagagaagcgctacatattcagctggcggatgaagcttattgtgtaggtcccgcggcaacaaaagatagttatttaaatatgtcaaacattattagccttgctgttttaacgaactgtgatgctattcatcctggctatggtttcttagccgaaaatgcagatttcgctgagttatgcgaagactgcaatattacttttatcgggccaagcgcttccgctatttcgcaaatgggaacaaaagatgttgcccgtgaaactatgcgtaaagcaggtgttccaatcgttcctggttcacaaggaatcgttgccgatgtggaagatggtaaaaaaatcgccaaaaaaatcggttatccggtgatcattaaagcaacagctggcggtggcggtaaaggtattcgtgtagcagaaaatgaagaaaaattaatctctggtattcatacgacgcaacaagaagcagaagcagcatttggagatccaggcgtttatcttgaaaaatacattcaagatttccgccacgtagaaattcaagtacttgctgataaccatggtaacgtgattcatttaggagagcgtgattgtagtattcaacgtcgcttgcaaaagctaattgaagaatcaccatcacctgccattgatgaaaaaacacgccaaaaaatgggtaaagcggccgttaaagctgccaaagccgtgaattattctggtgcaggtacaattgaatttatttatgatcatcatgaaaataatttctactttatggaaatgaatactcgtatccaagtagaacaccctgtaacggaacttgttaccggaattgatttagtcaaacaacaatttttagttgcttcaggtgaagagctacaaattaaacaagcagatgtgaaattaacaggttgggcaatggagtgtcgtattaacgctgaaaatccggagaaaaactttatgccagctccaggagaaattaaattttatcttcctccaggtggcttaggcgttcgaattgactcggcagcatatccaaactacaaaattccgccatattatgattcgatgattgctaaagtaatctgttatgcagaaacacgtgaagaagttattcaaaaaatgaaacgagcgttgtctgaatttgccattgatggcattccttcaaccattccattccatttacgcgtgttagataatgatgtatttttatcaggcgacttcaatacaaaattcttggagcaaaatgatgtaatgaatctttctaaggagggctaaataatggcttatacaaaagatttgcgaaaacaaaatgatgcaccgctcggtaaaattgagattgcaccagaagtaatcggcgtaatcgctggactggctgcaagtgaaattgaaaacgttgcttatatgcaaggtggcttcgcgacagaaatgcgcgaaaaattcagtggtgctgtaaactaccgtaaaggcgtaaaagtagaactaaccgaagaaggaattctaatcgaactttattgttcagtcttatttggcgcaacaattccacttgttgctcaaaatattcaagatgctgtcagagataccatttttaatatgactggtttaaatgtactcgaaatcaacgttcatatcgttggcgtacaatttgaaaaaacagaaacactttccttcgatgattttgagctataaaattcaaggaacaaaaggagcagctttaacatgaaaagaagagaggcgcgcgagaaagcacttcaagcactattccaaatagagctaaacgaaatgtcgctagatcaagctattaaaaacatcatggaagacgagcaagacgactatatggaaaaattagtcgaaggcgttatggcaaataaagctgaaattgatgctatcattgagcctaatttagataattggcgcatggatcgtttgagtaaagtcgatttatctttacttcgactaagtgtttatgaaattaagtacttggatgatgtgccaaatagagttagtttgaatgaatccatcgaaattgcaaaaatttacagtgatgaaaaatcaagtaaatttattaatggcgtacttgctaatattgcaccggaagataaataagcttgattgagtgcaagggaattcccttgcactcccttatttcgtgattttttaagaataattacgtggaacttatttttaagggggcaatactcatgggagaaattattgatggcaaaaagttagcaaaagaaattcaagaaaaagtaacaagagaagtagctgaattagtaaaagaaggtaaacaacctggtcttgctgttgtgctcgtaggcgacaatcaagcatctcgtacatatgtaagaaataaacaaaaaagaacagaagaagcgggtatgaaatctgttttaattgaacttccagaaaatgtaacagaagaaaaattactatctgtcgtagaagagctaaatgaagataaaaccattcacggcatactcgttcagttaccactaccagaacacatttcagaagaaaaagtaattgatactattagctttgacaaagatgttgacggttttcatccagtgaatgtaggtaatttattcattggaaaagattcatttgttccttgtacaccagctggaattattgaacttataaaatcaaccggcactcaaatagaaggtaaacgcgctgtcgttattggtagaagtaatatcgtagggaaaccagtagcccaattactgttaaatgaaaacgcgacagtaaccattgcgcatagccgtacaaaagatttaccacaagtagcgaaagaagcggatattcttgttgtagcaacaggtttagctaaatttgtgaaaaaagactatatcaaaccaggtgcgattgttattgatgttggcatggatcgcgacgaaaataataagttatgcggtgatgttgactttgatgacgtagtacaagaagcgggattcattacgccagtaccaggtggcgttggcccgatgacaatcacaatgctacttgcgaacacattaaaagcagcaaaacgcatttggaaaatgaattgattaattggatgtgaaatgatggagcaagataaatatttgacggtagcagcaataaccaaatatatcgaaaaaaagtttgaagtagatccctacatgaagcaagtttttgtgcgtggtgaaatttcaaacttaaaacaaccagcaagtggacatctatattttacggtaaaagatgaatttgcaatgcttcgttctgtcatgtttcataaagcagttcaaaaaatcggttttgttccagaagacggcatgaatgtccttgtcacaggaagaattggtgtttttacaaaagctgggcgctatcagttttatgcagaacatatggaaccggatggtgtcggagctctgtatattcaattagagcaattgaaagcacaattagaaaaggaagggctttttgcggaaacgcataaaaaagtgcttccttctttcccgtccaaagtcgctgtcgttacatccaaaactggtgcggctgttcgtgatattctaaccaccattcatcgaagaatgccttctgtggaagtgattgtttatccaactattgttcaaggggaaaaagcagctcaaaaaattgtcgaaaacattggcaagattaatcagcggaacgatattgatgtcatgattattgggcgtggtggtggctcgcttgaagaactatgggcatttaatgaagaacccgttgttcgagcagtatatgattcggatgtgccggtaatttctgctgtcggacatgaaactgattttgcattaagcgatttttctgcagatgtacgagctgcaacgccaactgcggcggcagaacttgctgtcccagattatcgcgatttagaagaacgattagcagaacgtaaataccgtttgctcgcggttaccagacaagcattagaaagaaaagaacggtcactagagcaacttaaacaacacttgattctaaatggtccgaaacatcaattagaacagcaaatggaacgtacagattatttttccgaacgattaaataatgctttttctaaacaaatatttgttaagcaaacagcttttgaccggttaaatgatcggctacattattaccatccgaacaaagaaattgaacttcaaaaagaacaaatgacattgcaccttcaagcgttggataaagcgatgaaacaacttttgaaagacaaacaacaatctttctttaggcaagtagatgcgctagaacatctgagccctctttctttattgaaacgaggatttggtgtaacgtataaagagaatacactggtcaaatccgtacaggagcttgaagtcggtgataatattcaagtgaaaatgcaaggcggacatatagatgcactcattaccgcgaaggaggaagatataagtggcaactaaaaagaaaacttttgaagaagcaattgcagaattagaaacaatcgtagaagcactcgaaaatggtagtgcctcacttgaagattctctcgatatgtaccaaaaaggaatcgaactaacaaaattgtgccaagataaattacaatcagccgaaaaacgaatggcaaaagtagtcacagatgcaggagaagaaattccttttgaagcggatggtgaataaatttgcaagatttaaccctttttttagaacaatataaaaaagtgattgatgagtcgctttttaaagaaataaacgagcgaaatatcgaacctagactaaaagagtccatgttatattctattcaagcaggcgggaaacggattcgtccaatgctagttttcgctacgcttcaagctttaaaagtaaatccgcttttaggtgtaaaaaccgcaacagcgttagaaatgattcacacatacagccttattcatgatgatctaccagcaatggataacgatgattatcgtcgaggcaagtggactaatcataaagtttttggcgatgcaactgcgattttggcaggagatgctttactaacgctcgctttttctattttagctgaagacgataatttatcttttgagacacgcattgctttgattaaccaaattagttttagtagcggtgcagaaggaatggttggtggtcaacttgcagacttggaagcggaaaacaaacaagtgacgctagaagagttatcatccattcatgcacgaaaaacgggtgaattattaatttatgctgtaacctctgcagcaaaaattgcggaagctgatccagaacaaacgaaacgcttacgaatttttgcagagaatattgggattggatttcaaattagcgacgatattttagatgtaattggtgatgaaacgaaaatgggtaaaaagacaggggccgacgcttttctgaataaaagtacctatcccggattactcacgcttgatggggcaaaaagggcattaaatgagcatgttacgattgcaaagtcagcgctttcagggcatgatttcgatgatgaaattctcttgaaacttgctgatttaatcgcacttagagaaaattaatcataattatctagtaatttcaaaattttttcacatatataattcaaattgatttgcttttcctaaaataccgtgttatactaatgtaagattatttttgtgggtgaaagatacgattgtgaacaactttccatctcgtgccgttaagcaagaatagtaaataattagtgtgcataacacacgaggaggaacatgaacatggaacaaggtacagtaaaatggtttaacgcagaaaaaggatttggttttatcgaacgcgaaaacggtgacgatgtattcgtacatttcagcgctatccaaggcgacggattcaaatctttagacgaaggtcaagcagtaactttcgacgttgaagaaggccaacgcggacctcaagcagctaacgttcaaaaagcgtaattctattttttgaataagaaaaagcaaatcatttcggtgatttgcttttttatttgtctaaaattattttaccttgtttggtttaatggcgattgtttgctataataagaacaattaatcgagaaaaaagaccttgcacgcattcatgcgagtggctctttggaaagtgagttgtttttatttggatcttttaaagataaaggatccttcctttatgaagcgattggatatacaagaattagaagcacttgcagcggatattcgcgcttttttaattacttctacttctaaatcaggtgggcatattggtccgaatcttggtgtggtagaactaacgattgcgttgcattattcttttaatagtccaaaagataaatttatttgggatgttggtcaccagtcatatgtgcacaaaatcctaactggaagggcgaaccaatttggtactttacgcgagcacggggggctagatggatttccaaagcggaaagaatctattcatgatgtatttgaaacgggacatagctcaacttctttgtctgctgcagccggaatggtcattgcgagagatattaaaaaagaagatttttatgttattccgataatcggtgatggtgccttaactggcggaatggctttagaagccttgaatcacataggcgatatgggaaaagatatgatagttattttaaatgataatgatatgtcgatagcgccaaatgtgggagcaatccacaacatacttggaaaattaagaacctccgatacatctaagcaaacaaaaaccaatgtcgatggtgctttttttgaagagcttgggtttatgtacttgggcccgattgatgggcatgatatagaagaggttattactaacttggaattagcaaaacgcgcaaaagggcctgtgctgctccatatcgttacgaaaaaaggtaaagggtatcagccggccgaattagactctcgtggcacctggcatggtacagggccttataaagtcgaaacaggcagctttattaagccggctaagcgtgcagcgtcatggagttcagttattagcaatgaattaatacgtttggcagaaatggatgaacggattgttgcgataactccggcgatgccagttggctctaaattagaaaaatttgcgaaagctttcccagaacgtttttttgacgttgggattgcggaacagcatgcgacaacaatggcagctggcttagctacacaagggatgaaaccattccttgctatatattccacttttttacaaagagcctatgatcagttagttcatgatgtttgccggcaaaagttgaatgttgtcattggaattgaccgggccggacttgttggcgctgatggcgaaacacatcaaggtatctttgatatttcatttttaaatagtattccaaatatgactattagcatgccaaaagatgaagtagaagctagacaattaatggatactgcgttttcgtataatgatgggccgtttgcgattcgctatccacgcggggaagctcctggtgttcaagtagtagagtctaatacacttataccaatcggacagtgggaaacaatcattcagccgcttgatgccgttattttaacctttggccctaccatcgagctagcgctaaaagcagctgaacaattagagatagaaggataccgcgttggagtaattaatgctcgttatattaaaccattagacgaagcactgttacacaaaatcttaaagcaaaaaattccaattttaacagtagaagaatcgctattaaagggtggatttggtgcgagtgtgttagaatttatagaagcgaataattatagggatgttataatgcatcgaattggtttaccagacgaatttattagccacggttctgtatccataattttggaatcgtttggcatatcaacaactggattggtattaaaaataaaagaaatgctcgcgcaaagcgggaagttaagggcgaagagactatgacaattaaaaaagaacgcgcagatattctgctagtagaacaaggactatttgaaacaagagaaaaggcaaaacgtgcaattatggcaggaattgtttaccggaaagaagaacgtgtagataaaccaggagaaaaaatccctattgatagcgaactccaagtaaaaggaaagcaaatgccttatgttagtcgcggcggattaaagctagaaaaagccttgcaagtatttgattttgaagtgaaagacaaactaatgctggatattggagcatcaactggtgggtttacggactgtgctttgcaaaatggagcaagacattcttatgcactggatgttggttataatcagcttgcatggaaacttcgcaacgacgaccgcgtcaccgtgatggaaagaactaattttcgtcatgtaaaaccagctgattttgcagaaggtttagctgattttgcaaccattgatgtgtcgtttatttcactcaaactaattttaccagtacttagaactgtgcttgtaaccggtggcgatgtgatgacactgatcaaaccacaatttgaagcaggtcgagagcaagttggtaaaaaagggattattcgtgatccagcagtacatgaatcggtagtcgaacatattgttcaatttgcgcttgataatggttatgacttgatgggactagattattcacctattacaggtggagaaggaaacatcgaatttatcgcacatcttaaatggactggcgaggaaactggaataagtcatttggaaccagatgcgattgcgaaacttatcacaaaagcacatacaaaattagataaataatgtataccggaaagcattgatgttttccggtttttgcttttaccatgccattttggctcatttcgagatgtattttctatgtataaagtattaaagaaacttttcttgcataaatttgcactaaatccgtgactttatgcgttttttcggataagatgtaagtagaaaattatcgtgaggtgaagaaggaatgaataaaggtcatcgtcatattattattcgagaattgattacatctaatgagattgacacgcaagaagatttagtagaacttcttttagaacgcgatgttaaagtcacccaggcaactgtttcccgtgatattaaagaactgcatcttgtcaaagttccaacacaaacaggtggctacaaatatagtctacctgccgataatagtttcaacccacatcaaaaactaaaacgcgctttgattgattgctttattggcattgataatgtgcaatttatgattattttaaaagtaatgcctggaaatggaaactcggttggtgcattaatcgataacttggactggccagaaaaagctggaactatttgtggagatgacacttgtttaattatttgtcgctcggaagaaaatgcgaaaacattaacagatcgttttatagatatgctttaaaaattgttggaggtgaaagattttgcttcaagaaatgacaattaaaaactttgctatcatcgaatcgctttctttaacttttcaagaagggatgacggtacttacgggggagaccggcgctggtaaatcaattattattgatgcgcttggtcttcttgttggcggacgcggatcagctgattttatccgtcacggagaggaacgtttagagcttcaagggctttttgcgctagcagaggataaccttgcttgccgaaatgctttaatagaaaatggcatagatgcttcggatgatatggttgtactagaacgcagcctgtttcgctcgggaaaaaatagttgccgaatcaatggcaagcttgtaactactgttctcttgcgccaaattggctcgaaattaatagatatccatagtcagcatgaacatcaggaattgatgaatgaggagtttcatttatcattacttgatcgattcgcttctgacaaaatcaagccagcactaaccaagtaccaaactaatttcaaagaatatcaaacaattgagaaagaatggcaaaattggacaaaaaatgagcgagaattagcacaacgtcttgatatgctccgttttcaacaacaggaaattgaaaatgccgatttgcaagctggtgaagaagatcgtttgttagaacaaaaaaatatcttagccaattttgaaaaacttaacgaaaatttacaaggcgcttatgcggcgattcaaggcgagccaggtggacttgaattcgttggggaagcgatgcgtcaaatggagacagctgcaagtattcatacggattataaagcagttagtgaagcaatttcttctagctactatatgttagaagatagcatgagccaaatcagacagtcacttgatcagctcgaattccaaccagaagaacttaatcaaattgaatcgcgtttaaatgatttaaaccaattgaaacgcaaatatggtaaaacaattgaagatatcatccagtatgagcaagaaataagtagcgaaatggaaaaactaacggatagtgaatcgcatgtgggtcatttagagacaaaattagccacactcaaaacagaactaacaaaacaagcagctacgctcactgatatccgtaaaaaagcagctgtcacattagaaaaacaaattaaacaagaattaaatcaactttatatggagaaagccatttttagtgtgcgttttgaagcaaacaaaatggaactaacagaattgggacaagatagcgtcgtcttttatatgtcaacaaatccaggagaaccattaaaaccattagcaaaaattgcttctggcggagagttatccagaatgatgttagctttaaaaaccattttctctagacaccaaggtattacatcaattattttcgatgaagttgataccggagtaagtggacgcgttggtcaagcgattgcagaaaaaatttatgctgtttcagtcggctcgcaagtactatgtatcagtcatttgcctcaagtagcagcaatggcgaaccaccattactacattacaaaaaaagtccaaaataaacgtacaacgacttccgttacagtgcttaaaggagtagaaaaagtagaagaaatcagccgaatgattgctggtatagaagtcactgaactaacaaaacaacatgcaaaagaaatgattgaacaagcggaaaaagtaaaacaaacgtattaaacaaacgaaattgcttgcatatcgaatagtttttgcttaaaatgaataaggtagaaattattacctggtcataaaaacaactactaattcgagatgcggcttttttgtgcgataaaggagttatttttatgacaaaaagcagatttttttcagatgtagcagaaacgagttcatttgtttttgcagttgccggcgcagatgatgaggtggtattagaaaccattcgtcttgcattaaaacaaaaactaggtaaatttcttttatttggtaagaaagaagacaaaaccttaacagccaacgaaagtgttacgtggattcaaactgataccgcagaagctgcagcgcagggtgccattttagctgtaaaaaataaagaagcagacattttagtaaaaggattcatcccaacagctacactgatgcaccacgtattaaaaaaagaaaatggccttcgaactgaccaattattaagtcaaattgctattttcgacattccgacgtatcacaagccattattaataactgattgtgccatgaacgtagcaccaaaaacaaaggaaaaaattgctatcacagaaaatgccttagccgtagctcatcagattggtatcaccaaccctaaaatcgctttacttagtgcagtagaagaagtgactgcaaaaatgccatctacattggaggcgcaggaagtagtacagcattttggaaaccaaatatccgtctcaggtccgctagctctcgatgtagctatttccaaagaagcggctctccataaaggaattacggatagttcagcgggagaagcagacatattaattgctcctaatattgaaacaggaaatgcactttataaatcattagtctactttgctggagctaaagtaggtagtgcagtggtcggagcaaaagtacctattgttatttcctcaagaaatgattcaccggaaaacaaattagcttcattcatactaactgtaagactagttgagaaatgatgaaataatgtgaatagacggactttaacaatctgaatgcaaaggcttttatttgattacagcctacgtgttacaatagtccatgggaaaatgataacctaccgcatttttcacaattaaatttggaggaaagcaaatgtcttttgatgttttaaccataaatccaggttccacgtctaccaagctcgcggtttaccaaggcgacaaagtactttttgaagaaacagtcagacacacaatgcaagaactagccgactttaataatgtacaggaacaatttgattttaggtggcaagttctacgtcgagtgatggatgcacatggttatgatgtaaagaaattacaagcggtagttggaagaggtggcttacttcgaccagttgccggcggtacatatatggttacagaaaaaatgatagatgatttaaaagaaaataaatacggagagcatgcttcgaatctaggggcaatgcttgcaaaaaaattagcagatgaacttactatacctagttttattgtggatccggttgtcgtggatgaaatgcaggaaattgcaaggatatctggtaatgccttcgttactagaaaaagtatttttcatgcattaaatcataaagcagcaggtcgaaaaattgccaaagagctaggaaaagattatgaaaaaatgaattttgttatcgcgcatcttggcggtggaatttcagttgccgctcatcggcaaggaaaagcggtggatgtgaataatgccttagatggggacggcccttttagtccggaacgttctggttctttaccgatgaatgattttctagaagcatgttttagcggtaaatggacgaaacgcgaattgcatgaactgattgttggtcgtggtgggatgatttcatatttaggaactaacagcatgctcgaggtggaagctaaagtacaagcaggtgaggagaaagctatcgaagcttttgatgctatggcttatcaagttagcaaagaaattggcgcatgttccgttgtattgcaaggtaaagttgacgccataattttaactggtgggcttgccagaagtgaactttttacaagcaaaattattgagcaaacaaactggataaccagcgtaattatagaacctggagaagatgaattagaagcattaaatagcggagtgcaacgcgtgctcgctggtcttgagaaagaaaaagagtactaaaaggaggagataatgtggcaaaagaatatgatgtagttattcttggcggaggaactggcggttacgtcgcagcaattcaagcagctaagaatggccagaaagtagccgtcgttgaaaaagggaaagttggaggaacgtgtcttcaccgtgggtgtattccaacgaaagcgttattacgttcagcggaagttctacaaacggtaaaaaaagcaagtgaatttggtatttctgtagaaggaactgccggaatcaattttttacaagcacaagaacgaaaacaagcaatagtagatcaattagaaaaaggtattcaccaattatttaaacaagggaaaattgacttgtttgttggaacgggaactattttgggaccatcaattttttcaccaacagctggaacaatttcagttgaattcgaagatggttctgaaaatgaaatgctaattcctaaaaacttaattatcgcaactgggtccaaaccgcgcacattaagcggtttaacaatcgatgaggaacatgttttatcatctgacggcgcgcttaacctagaaactttaccaaaatcaattattattgttggcggtggggttatcggaatggaatgggcttcgatgatgcatgatttcggtgtagaagttacggtgctagaatatgcagaccgaattttgccaacagaagataaagaagtggccaaagaattagcaagactttataaaaagaaaaaattaaacatgcatacatctgctgaagttcaagcagctagttataaaaaaacagatactggtgtggaaattaaagcaatcattaaaggcgaagagcagactttcacagcagataaaattcttgtttcagttggtcgttctgctaatacagaaaacatcggcttacaaaatacagatatcgcgaccgaaaacggctttatccaagtaaatgatttttaccaaacaaaagaaagtcacatctatgcgattggagactgcattccaacgattcaactcgcgcacgttgcaatggaagaaggaacaattgcagccaactatattgccggaaaagcagccgaaaaacttgactacgacttagttccccgctgtatttatacttctacagaaatcgcaagtgtcggtatcacagaagaacaagctaaagaacggggtcatgaagtgaaaaaaggcaaattcttcttccgtggtatcgggaaagcgctcgtttacggagaatcagatggcttcattaaaattattgcagataaaaaaacagacgatatcttaggcgtgagcatgattggaccgcacgttacggacatgattagcgaagccgctttagcacaagttttaaatgcaacgccgtgggaagtgggcaacacgattcacccgcacccaactttatcagaaagttttagagaagctgcccttgctgtggatggcaatgcaattcacggttaatacagctttaaaggaggaacaaaaatgactttaaaagaagcaggtttaacagaagataaattaattaaaatgtatgaaacaatgctaatggcaagaagactagacgagcgtatgtggttgctgaaccgttctgggaaaattcctttcaccatttctggacaaggacaagaaacggcacaaattggcgcagcgtttgcctttgatttagataaagattacgcattaccatattaccgtgatttagcggttgtattggcgttcgggatgacagcgaaagacattatgttatccgcgttcgctaaagcagaggatccaaactctggtggacgtcaaatgccagctcattttggtcaaaaatcaaatcgcatcgtgacacaaagttcaccagtaacaacgcagttcccacatgcagcaggtattggtcttgcagcgaaaatggccggtgatgagattgcaatttatgcttcaacgggtgaaggatcttctaaccaaggagatttccatgaaggaatcaacttcgcatctgtacataagttgccagttgttttcgtgattcacaataaccaatatgccatttccgttccagcatcgaaacaatatgctgcagaaaaactatccgaccgagcaatcggttatggtatcccaggggaacgtgtggatggcacaaatatgggtgaagtatacgcggcatttaaacgtgcagcagatcgtgcaagaaacggcgagggccccactttaattgaaacagtttcttaccgattcacaccgcactcttctgatgatgatgacagcagttatcgttccagagaagaagtgaacgaagcaaaaggaaaagatccactgacaattttccaaacagaattactcgaagaaggttacttaacagaagaaaaaatcgctgaaatcgaaaaaaatattgcaaaagaagttaacgaagcaaccgattacgcggaaagtgcagcatacgctgaaccagaatcatctttactttatgtatatgatgaagaagcgaatagctgattaggagggaatttgaatgccagtcatttcatatattgatgcaataaccatggcgcttaaagaagaaatggagcgcgatgataaagtatttattttaggagaagatgttgggaaaaaaggtggcgtatttaaagcgactgctggtctatatgacgaatttggtgaagacagagtacttgatacaccacttgctgaatctgcccttgccggagttggaattggcgcggcgatgtatggctaccgcccagttgcagaaatgcaatttgctgactttattatgccagctgtcaaccaaatcatttcagaagctgccagaattcggtaccgttctaataacgattggtcttgtccaatggttattcgcgcaccttttggcggcggggtacacggggcactttaccattcacaatctgttgaaaaagtgtttttcggacaacctggtttgaaaatcgttgttccttcttcaccatatgatgcaaaagggcttttaaaagcggcgattcgcgataatgatccagtgcttttctttgagcataaacgtgcgtaccgcttgctgaaaggcgaagtgccagaaactgattatatcgttccaatcggcgaagcaaatgttgttcgtgaaggtgatgatattacagtaattacttacggacttgcggttcaatttgcccaacaagcagcagaacgtttagcagcggaaggcgtagaagcacatattcttgatttacggacaatctatccactagaccaagaagcaattattgaagcaacgaaaaaaacaggtaaagtacttcttgtaacggaagataacaaacaaggaagtattatcagtgaagtggcagcaatcatttcggagcattgtttatttgacttagacgcaccgattgctagactcgcaggacctgataccccagcgatgccttttgctccaacaatggaaaaacattttatgatcaatccagataaagtggcggatgcaatgaaagaattagcggaattttagacccgttttaaaataaaggagtgaagacccgtggcagttgaaaaaatcaccatgcccaaattaggggaaagtgtaacagaaggaacgattagttcatggttagttaaaccaggcgatacagtagaaaaatatgatgctatcgcggaagttttaacagataaagtaacagctgaaatcccatcatcctttagtggcactatcaaagaaattttagcagaggaagatgaaacactagaagtaggcgaagttatttgtaccatcgaaacagaagaggctagtagttcagagcctgtagttgaagcagaacaaacagaaccaaaaactccagaaaaacaagaaacaaaacaagtgaaattagcagaagcaccagccagtggaagattttcaccagcggtactgcgtattgctggagaaaacaatattgatttatcaaccgtagaaggcacaggtaaaggtggccgaattacaagaaaagatttacttcaagtaattgaaaatggtccagtagctccgaaacgcgaggaagtgaagtctgctccacaagaaaaagaagcgacgccaaatcctgtacgttcagcagcaggtgacagagaaatcccaatcaatggtgtaagaaaagcgattgctaaacatatgagcgtgagtaaacaagaaattccgcatgcttggatgatggtggaagtagatgcaactggtcttgttcgctatcgtaatacagttaaagacagctttaaaaaagaagaaggttattcattaacttatttcgcctttttcatcaaagccgttgcacaagcattgaaagaattcccgcaacttaacagcacgtgggcaggcgataaaattattgagcatgcgaatatcaatatttcgattgcgattgcagctggtgatttattgtacgttccagttattaaaaatgcggacgaaaaatccattaaaggcattgctcgcgaaattagcgaacttgctggaaaagcgcgtaatggtaaactaagtcaagccgatatggaaggtggcactttcactgtaaatagtactggttcatttggctctgttcaatcaatggggattattaaccacccacaagccgctattcttcaagtggaatccattgttaagcgcccagtaattattgacgatatgattgctgtacgagatatggtcaacctatgtctatccatcgatcatcgtattttagacggcttactagcaggtaaatttttacaagcaattaaagccaaggtcgaaaagatttctaaagaaaatacagcgttgtattaaaaatgttttaatctaggtttagcgggtattgtttagtacatctagatccatacccctaaactccctagatgtcttgggtagtactctcgggtgctgctctttttttgaggagaaaaataaaaaaagtctgaaccaaatcggcccagacgttggatatttataaaaacattaataccccggttaaaacacttgataatacaatcgcgattaacattaaaataacgacaacgcgaactacttttttattagtcattgcggaagaaaactcctctcataaagcatttcagatatatatatcttacttataattaaagtaaatttcaagtcatttattgatttttaaagcaaataggaagaatgtaggtggaaaaatgatgctatccaatgtaaaaaaatattttaccgaattaatccaaactccatctgtctctgggaaagaaacagctattttaacgtatataaaaaaacatctagcaaaattaaacattgaatatagtttggatgaagattatggtttaattgcgcgaattcctgctactaaagagaaatttccaacgatttttttctgtagtcatgtggatacgcatccaaatgcggcaacgccagtttttcaaatggagcaagatgtatttacggcagagaaaggcacttctttaggtgcggatgataaagcagcagtagcagctatgttagcggctattgattatttttgtgcagaacgaacagctcatggggagattgaattcattttcacgacgaaagaagaactcggcatgattggaatgcgtttatttccggaagaaaaaattactgcagcttatggatactgtttagatgcaccaggtgaagtcggaaattatcaattacaagcaaatacgttagtcgcattagaatttactattgcaagttctgaagctgcccaaatgtcgccgatttctatagcgagaatggcgttacatgccacacggccaggcagaattgaccgagaaaataaatgggaaattcagtcgttttctggtgggataaatgatgaaaatcaacaagatgcccaattagaagttctttttacatcagcagcaagtttccgtaaggctctcttgcatattcagagcattagagaacgatttgcgcaaacttgcgagaaatatggtgctattttgacgcatgatacaaaattaatttatgaaggttaccaaattcgctctaagcacccactaatgaatattttccaaaaagccgcaaaaaaacaatctttggaaacaaaagaaatatttttagaaggcggaacagatgcaaatgtgttgaatgaaaaaggtattccgaccatgctcttatcagcaggatacgaaaatgcgcacacagaggaagaaacagtatctattgagcaattagaaaaacttacacaactcatcattgatttagcagaatccgcaaaaaacgagaaaattcttctcagaaaactaaattagtgaaaaaaagtcaaataattcggattgattcattgtccaagaagcaattctttgatatagtaaatgatgttgatacttttatgtgtcatgttgaagtaagacagatttttctgccttaataaaccggaaaggaagaagtgcaaaatggcaaaacaagaaattggcgttataggaatgggcgttatgggtcgtaacttggctctaaacattgaaagccgcggtcatacagtatctatctttaaccgctcgactgaaaaaacgaaagcagttatggaagagaatgcggacaaaaaattagtaccaacttatagtttagaggaatttgtcgaatctcttgaagtgcctcgccgtatccttattatggtaaaagctggcgatgctacagatatgatgattgaagcagttaaacctttcttaaacgaaggcgatattttaattgatggcggtaatgctttcttcaaagatacgattcgtcgtaataaagaactaagtgaagaaggatttaatttcatcggaactggtgtatcaggcggagaagagggcgcgctgaaaggtccttctatcatgccaggtggtcaacgcaaggcatatgaccttgtagcccctattttacgtgaaattgctgcagtagcagacggagagccatgtgtgacttacattggtccagacggtgccggacattacgttaaaatggtgcataatggtatcgaatacggcgatatgcaattaatcgcagaagcttacactattttgaaagaaatcggcggattaagccatgatgaacttgctgacgtatttgaagaatggaataacggggaacttgatagctatttaatcgagatcactaaaaacatcctaaaagtaaaagacgaagaaacaggcaaaccaattgtcgatgttattctggataaagctggtcaaaaaggaactggtaaatggactagccaaagcgcacttgacttaggtgttccgctttccttaattacagaatctgtatttgctcgttacatttctgcactcaaagaagaacgcgtttatgcaagtactgttttaactgggccatcgaattatcgttttgaaggcgacaaaaaagcatttgttgaatctgttcgtcgcgcactttactttagcaaaatcgcatcttatgcacaaggttttgctcaaatgagagctgctagcgaagagtacaattgggatttacaatacggcgaaatcgcgaaaattttccgcgctggctgtattatccgtgctcgtttcctacaaaaaattacagatgcttataaccaagataaaaatcttaaaaacttactacttgatccatatttcaaagatattgcacataactaccaaggcgaccttcgtacagttgttgcagaagcagtaaaagctggaattccagtaccaacattcactgcggcaattagctactacgatagctatcgttcagaagtattatctgcaaatctaatccaagcacaacgcgactactttggcgctcatacgtatgaaagagtcgacaaacctggtgtattccatacagaatggccacaagtagaagattgatggaagataaggcatccactttaacgagtgggtgccttttttatgagatttgaattagtaaatcatggtaaagtgctaaaaaaaagtgaaaatatctatttatgcgctgttattagttgtttttgagctaaagttcgttacaatagtaataggaatatagtgtaatgaccgaaagagagggttaggccaaatgaatagaatactaatcgtagaagatgaaaaaaacttagcacgctttattgaactagaactccagcatgaaaattatgaaacagcggttgctaatgatggacgcgctggactcgaactcgcacttaatgaagaatgggatgctattttactcgatctaatgttgccacatttaaacggggtagaagtttgtcgtcgtgtgcgccaagtgaaacaaacacccattattatgataaccgcacgtgactctgttatcgatcgtgtatccggactggatcacggagcagatgattacatcgtcaaacctttcgctattgaagaattacttgcgcgccttcgctcgctattgcgtcgggtggaaaatgcagaacaatctgctaaacaaacaacgctacagtatcgtaatctaattgttgaaaaggaaaatcgcattgtcaaacgcgacgaagaaatcattgacttaacaaaacgagagtatgaacttttacttacgttaatggaaaatgttaatatcgttcttacgcgggaagtgttactcaataaagtatggggttatgaaacagaagtagaaacaaatgtagtggatgtgtacgttcgttacttacgaaataaaattgatcatcctgacgaagaaagttatattcaaacagttcgcgggacagggtatgtgatgcgtacatgacgactagcccattttccttaaaaagtcgttctttgaaattcaaatggacttttggcgctagtgcagctatttttctaacttttttcttattttcctatgccatttaccaaggaattgggcaaatgttgttaaatgaagaagaaccagaagtaaaagaactgcttctagcaacaacgagtacgttaacgaatcaagatttgaccgataatgaggaaattaaatatttatttaataatgataaaaccgttaatcgcaaactccaagatcaagtgattaatttatatgataaagatggccattttattaataagtattatttttcaagaagtcaagatatcactagcattgacttttcacagtattttgttagcggtacagataagtttattatgaataaaccaaccattgatgggcagaagatgatgacggcgcaaatgccgattgtagcagatgataataccaccgttatcggttatgcacaggtggtaaatccgctcacttcctataatcggatgatggaccggcttctcgttacgatgattttacttggggcagtggcgctctttattagtggaatgctcggctacttgctagcacaaaatttcttaaacccactgactcgtctagctcgaacaatgaatgatattcgtaaaaatggttttcaaaaacgaatcgagacgaaaactaattctcgcgatgaaattggcgaattgaccgttgtttttaatgatatgatgacgcgaattgaaactagtttcgaacagcaaaagcaatttgttgaggatgcttcccacgaattacggacgcctgttcaaataatggaaggtcatttaaaactcctcactcgttggggaaaagatgatccggctgtacttgatgaatccttaaacgcctctttaacggaattagaacgtatgaaaaaattagtacaagaaatgcttgatttatcaagagcggaacaaatttcacaaacaaaagaattacaaattaccgatgtaaatgcaacagtagaacaagtaagacgtaattttgaagtgatgtatgaaaatttcacgtttaccttaaaagaagatgatactgatttacgagcacttattcaacataatcatttagagcagattttaattattattatggataatgccgtgaagtattcaggtgacggcaccgaagtggatatgcatgtctataaagaacaaaagcaaatccatattgatgtgcgtgattacggggaaggtatctcacaagaagagattgataaaatattcaatcgtttctaccgtgtagataaagccagaagccgcgaaaaaggtggtaatggcctcggacttgcgattgctaaacaattagtcgaaggatatttaggaacgattaatgcggttagtgagccagataaaggtacaaccattaaaattacacttccttacattgaaccaaaatccaaataaaaaaccgcaaccttatgacgaggttgcggtttcttttatttttctttcttttgttcttctacgatttgctcgaattctttttcttcttgttccattactttaatttctgggtgtttattcatataaagttttttggttaataaggtttgacccgctaagaagagtccgccgacagcccagtataacgctagtgcagaaggggctgtgaaggaaacgaataaaatcataataggagacattaaaccgataattttcatttgtttcttttgttcgggcgaataaccaatcatggaaacaaagtattgtgctaagtagacaagtccggcgataattgcaagcaccatatccggtgagcctaagttaaaccataaaaatgtgtggctagcaatttcggaagatccgcgaatagcataatagaaagccatcaatatcggcatttgaataagcaacggtaaacaacccatttgcattggattgatattatacttggaataaacagccatcatttctttttgaatagttgcttgttcttctttcgatgtagcacgttttaaccgagcttgaatttcatcaatttctggtttggcaacggccattttggattgcattcccatttgagctttagcagtacgcaagtttagtggcataattagtgcacggataagtaacgttgtaataataatcgcaatcccgtaattacctccaacaaactttgcaacgaacataataaaactagtaaatggttggatcaaataagtgctgaaaaacccatctgtattttgtgaagggtccatactacaacctgtaagtaatagtaaagcaccaagtaaaacgctaattaaaataatatttttctttttcaatgtttcattttcctcctaaatagtaaaataatcaattcatacgttggaaaatgaaaaactgtcttcatcatcagtaatggcgctacatttccgagttatagccagccaattaataacaaaattaggcgaggttctataaaaatgtgctcgaagtgaaatctttactggctttatgcagatagcgtcagcgggtagcaccattttcggttttaataatgtgatagccgaccaataactgaaaatcgtcaacattaataaaaacgttactgtgagtgaaatgaattctggttcaagtaaaatttgcaaaatggaaatcatgccacgcagtcgctcctttcaaggttttagtactcattaactataatgcaaaaagagctatagcacaactactatttttggaattttagtaaacgatatcaaatgtttttcgttcttctacaggcgcacctttgtaaatataaacgtgttcgatacgacacccaggcgatgggccttttttgatagcatcaatgaatttatttaagttttcttcttcagcaattgcatgaatttcaacggaaccatcatctaaatttttgactgttccactaatgtcatatttgtaagcaacgtgtttggttgtgtaacgaaatccaacaccttgcacaaatccagtcactctcaaaatcgctgtatctctagccataacgaaaccaactccttttatttttccttaccactagtgtatctttttttagcgttactttcaaaaatttgcattccagtatttcaggaaagcttatgctataataagtgtattatatttactgttgggagtttttgatatgacaaaatggaatgtctatctaactaaaggagaatacgagccttggtggtttttcgaggaatgggaaacatccattcaagaggacttctctttttctgataaagaagccgcttttctgaagtaccaagaattagcagaagcgttactgagcaattatcctaagcatcaaacaaaaaaagattgtttgttagcagcttggaatgaagaagaagtggagtactgcgaggactgtgaagatgatattcaaacatttcatggactgattttgttctttgagggggaagtgtatcaaccaactcccgaagagaaagagacgatttttaaacgagttttaacctttgcttgaggcgaaaagaaatttggaggattaacacatgcagaagaatgatgacttattaagagaacgtcgaaaagacgaacacgtggctcttggagtaaaacaaaatgagcaattagcgccctcgagtctaaaagatattcagttgattgggacatctatcccgcgctataatgtgaaagatattgatttaacaactactattttcggaaaaaacgttccttttccattttatattaatgctatgacaggcggaagtcggcatacgaaaaaaatcaatgccgaacttgctgaaatagcacgcgaagtagctatcccaatggccgttggttcacagtctgcagctctaaaaaacagttcgctaatagatacgtataacattgttagagaaatcaatccaaatggaatgattctagcaaatgttagtccggaagtagccattcaagatgggcttcaagcaatcgaaatgttagaggcaaatgcacttcaaattcatattaacccagcacaagaattagtaatgcaagaaggtgaccggtctttcagtcattggctaactagaatagaagagtatgtcaagctttcaccagttcccattgtagtaaaagaagttggtttcggaatgacgcgagaaacagtaaaaacgctagctgatatcggcgttcaaaccgtagatttagctggaaaaggcggaacaaactttgcccaaattgaaaatgaccgccgccgtgatcaagcatatgatttcttacttgattggggtatttccaccggacaagctttaatagacatgcaacaccaagacgcgccaaagattgcttatttagcgtcaggtggtattaggaacccgttagatatcatcaaagcattagcgctcggagcagatagtgtaggtatggcaggacaaattatttattcactaaaaaaagaaggcgtcaccaaaaccatcgaaaaattggagttatggaaagaacaactacgtggtttatttgttctagctaatgcgaaaaatattgcggaattgaaaacaactccattaattgtaagtggcgaacttgctaaatggggaacgttgcgagaaatcaatttagtcaaactagctaatagaaaataaaaaccagctgctattcatttagcaaagctggtttttttatttattgaaccatttctggtgaagattcattaattgcttgaaggcgttcagtgaattcttctttagataaatttttcgtataaagatttgctggatgaacacgacaatcatgcgaacaactacgcaaatactttttctcattttcgacagaagccaggatttgcttattgcaatacgggttagcacaattgatgtaacgttcgcaaggcgtgccgtcaaagtaatctttcccaacaatagtagggtttacttggttaatcggaaccgcaattctttcatcgaaaacatacatttggccgtcccaaagttcccctttggtttcttcgtttttaccataagtcgcaatcccgccatgaagttgacttacatcatcaaaaccagcagtttttaaccaaccggaaaatttctcacaacgaataccaccagtacagtaagtgacgatttttttatcagcaagttgctcgcgattatcttcaatccatcctggtagctcacggaaattttgaatatctggacgaacagcgccgcggaaatgaccaatatcaaattcataatcatttcgagcgtctaaaataactgtatcttcatccaacagtgcttcacgaaactcagaaggttctaaataagtccctgtaacttctaaaggattaacatcttcttctaaacttaaactaacaatttcagcacgaggccgtacatgcattttcttaaaagcatgagcatcagccgcgtcaattttaaataccatatcagcgaagcgagcgtcgtttgccatataatccatatatttgtttgttgcttctactgtacccgaaacggtgccattaatcccctcagtagccaccaaaattcggcctttcaattccatttctttgcaagctgcaagatgctcttttgcaaaagtttctggatcatcaatcgttgtgtatttgtaatataacaacacttgatagtcactcataatcttatcacccttcaaaatgtatttcatgtgcaagaataattctccacaagtttgcgcattaatactatactatagcaaattaagactggcaagtaaccgaactgtaaaataaatgcttcttattgttaactatatgtacaagtgcaaaacagctatggtatacttattaaatatgaagcgaaaattttgttgatgaaagctattactgttttcattgcctaaaataaagaatgaagtaaggattgggcgtgagctatgtgcaaataaatgaatcgtttatggaagaactagctttaaaaaaagtaaaacaagaacgcaggaaaaggttgaaatggtttgtttataaatttttaatgattacctttggtgctattttaatgggggttgggctggaacttttccttgtaaacaatcggattttagatggtggggtcgttggtatatcgattattatttcgcaactaacaccgctacctttaggggttttaacctttgtgcttaatattccatttttcatcataggttaccgaaaaatcggaaaagtatttgcgctgtttacattgtacggaattgcagtcatgtcgattgtaacgctcgttttacatgatatggatcccgtgacagatgatttactgcttgcaactgtttttggaggaatgacgcttggtcttggagtaggacttgttattcgtaatggtggggcgcttgatggcaccgagataatttctattatcatcaacggacggacgccattttcaacgggacaaattattatgtttattaatattgtcatttttatcgttgctggacttgtgttcaactgggaccgagcgatgtattccttgattacttatttcctagcatataaagtaattgatattgttattcaaggtgtagatgaatcgaaaagtgcttttattatcagtcgctattacgaggaaattggggcagaaattatggaacaacttggaaaaggtgtcacatacttagatgcaacgggtggatattccggtgatgtaagaaaagtagttttcgttatcgtctctagatttgaagaagtaaaagtgaaagctattctggatgaaatagatccagatgccttcttagctgtcgggggaagtatgtcggaagtacgcggcggaaagctgatgaacacgaaaacaccgcacctataacaaagcggaaaccatatatctcctacttgggatatgtggttttttgacgaaaggaaacatttgtttgtataatagggctatagtatgagcgacagaacggatagatgtgctataataaaacaagcaaaaaaaggaatgggtgggacttgaaatggcgacacaaaagaaaaaaacgagcggacgtaaaaaatcgtcaacacgttcaaaaaagaaacaatcagcctcttttcgtttagaaataacgggggttattttaatagcaataggagttatcggacttttacaattaggctttgtcggtcgaggtttttttgccctggctgagatgtttgttgggcttttaagctatgtattacttgcgggtagcgtgatacttggcggctacatggtaattagaaggaaaatgccacatttatttagcaaacgattagtcggtatttatctaattgttttaggctttttaacatatatacatatgtattttattatccataacttaggggcaaatgcgtccgtagtttctagtacgtggaaattagttctagaaaatttatttagaccaaatcaggtcggttttgttggcggaggaatgattggagctgcaattacttccatcacgtatttcttattagatcgcttaggaacaaatctgattgctgttctacttattatctatggtttttcccttgtatctggtatttccatccgtcaatttttctccaaaattgccgaatttgttcgttacttatttacgaaaggcaaagttgcgaccgaaaaagggaaagaagtaaaagcgaaacgagataaaaagaaagctgagaagattgttgatgttgagccagatgaagtaatcgatgtaatagaacctttgcaagaagaaaaaacaccaccaatcatttccaactttagctccaaagtagagcaagaaaaagcaccagtagaagaaaaaatatcgcaaaaagagcaagatttagaaatgtttcagcaagaatctttcgaaaatgaaatttatcaattgccaccagtagatattttagcgcctgccaaagtaactgatcaaagtaaagagtatgaccaaattaaagtaaatgcaaaaaaattagaagatacttttgagagctttggtgtaaaggccaaaatcacccaggtccatcttggtccagcagtgactaaatatgaagtacaaccatctgtcggtgttaaagtgagcaagattgtttcgctcagtgatgatatagcacttgctttagcagcaaaagatattcgaattgaagcgccaattccagggaaatcagctattggtattgaagtggcgaaccaaaatgtagcaatggtatccttacgtgaagtgttagaaaacaatccaaaaaataatccagacgagaagctccaaatagcacttggtcgtgatatttctggagaagcaatgatggctaatttggataaaatgccacatttactagtagcgggtgcaactggaagcgggaagtctgtgtgtatcaatggtattattacgagcattttactccgtgccaaaccccatgaagtgaaaatgatgatgattgacccaaaaatggtagagctaaatgtctataatggtatcccacatttgctcgcaccagttgtaaccaatcctaaaaaagcagcccaagcattgcaaaaagtagttgcggaaatggagcgacgttatgatttgttttcacatacgggtactcgtaatatgcaaggctacaatgattatgtgaaaaaacataacgaactgaacgaagaaaaacaacctgaattaccatttatcgttgtgattgtagatgagttagctgacctaatgatggtagcttccaatgacgtagaagatgcgataacccgccttgctcaaatggcacgtgcagcaggaatacatttgattatcgcaacacaacgcccatcagttgatgtaattaccggcgtaattaaagcgaatatcccgtctcgaattgcttttgccgtttcaagttccattgattcaagaacgattcttgatatgggcggggcagagaagttacttggacgcggtgatatgctgctacttccagttggctctagtaaacctactcgaattcaaggagcctttttatctgatgcggaagtagaagatgtagttaattacgttatttcgcaacaaaaagcacaatatagcgaagaaatgattcctgatgatattccagaagtcgaaggagaagtgacagatgagttgtatcacgaagcagtagaacttgttgtagaaatgcagacagcatccgtttcgatgttgcaaagaaaattccgtattggctataaccgtgcagccagattaattgatgaaatggaacaaagaggtgtagttggacctcacgagggaagtaaaccgagaagagtaaatgtcgaagttagtcctgagcatgaataaaaaaaggttgcgatttttaatcgcaacctttttttatgagagtaattctcgcttttgtgcttgaatttctttttcactagaagcatatttgttttgtgttcggtcaaggagttcgtcaaaaaaatttggtaactgcgctttgctaagctccacgccttctgcagtggtaccatcttttgttgcaacacgttgaattaagccgctaaatgtatagtcttcttccactaaaagtttagaagttcctgctaaagcaaaattaatcatttgaaatacttccgcatctgataatgaagatcttctgagagcagcctctacaaattgctcgaaaatagcagcaataattccaggagaggagctagttaaatcactagcgatatccatattttcttcccggatagtcattacatgaccaaaatgctcaaatgtagtttctaaccaagaagtgttagtttggttcactgtctcagcgtgagcaatcaaagtagttccaacattaacagcagttgtgagagaagggattaatttacttacctgtaaacctggagtgatttcaataatatctgaagtactcacaccagctgcaatagataccacatgacgatcaggtgtcaataccgcagcacaatctttcataagtggtaaaactgcgagaggtaacttacaaacaaagctatgatctgcttttgtgaaaatctcggcttcattatcagctaactcagctgttggatatttagtataaaattggttgaaatgctcgttttttgaattggaataaaggatgatttcttcgggagttgcaacctcagtttcaattattttagtcgcaattaacgaagccatacttccaaaaccgataaaacctatttttgccattttcatcccgcctttcattattcattttattatgaaggggataaaagaggattgcaactaaacttgattgtttactttttcacgttaatgcgctcgtgcctaaggattatcaaaaaaacgaatgattccgacagaattaaattttctgaattcatttgcattaaaaatttatgaagttggttatttatttattttattttccatgttatattaagaacagttggagaagacgttaaatgtttttgtgcgttttctgaaaaagggaccatacataatttctaatacgcgcctgaatgtttgttttgacagatagctctaactaacattatatctctcgggaggggttttaaggtgaaaaagcgtacatttgctttagcactatcaatgattattgcttctggcgttatcctaggtgcttgtggttcgagcagcgacgataaaaaaagtagcgatgataagagcagtaaagattttacagtagcaatggttacagatactggtggcgttgatgaccgttcgtttaaccaatcagcatgggaaggcttacaaaaatttggtaaagctaacgacatggaaaaaggtacagatggttacaactacttgcaatcagcttctgaagcagactacaaaacaaacttaaacactgctgttcgtagcgactatgatttaatttatggaattggttacaaactgaaagatgcaattgaagaagtttctaaacaaaaacctaaaaatcaattcgctattgttgatgacacaattgatgaccgtgataatgtagtaagtattggatttaaagataacgatggttcttatctagttggtgttgtagctggcttaacaacaaaaacaaataaagttggatttgttggtggagtaaaaggaactgttatcgaccgttttgaagctggtttcactgctggtgtaaaagctgttaatcctaatgcacaaattgatgtacaatatgcaaacgatttcgctaaagcagacaaaggacaacaaatcgcttcttccatgtattcaagtggagttgacgtaattttccatgctgctggtggtactggtaacggtgtctttgcagaagctaaaaacctgaagaaaaaagatcctagccgtgctgtttgggtaatcggtgttgaccgtgaccaatgggacgaaggaaaagttacagcaaacgatggcaaagattacaatgtaactcttacatctgaaatcaaacgcgttgatatcgctgtagaagaccttgcaactcgtgctaaagctggagatttcccaggcggaactaaaattgaatacggtcttgataaagatgctgtagggctttctgaacatcaagataatatttctaaagacgttcttgctaaagtagaagagtacaaacaaaaaatcgttgatggggacattaaagttccagaaaaaccttgattttatagttataaaaactgagtaatatgaacgaagtaaaaccttttatgaaagtcggtattatatgtgccggctttcataaaaaaataatttgtaagcgttttaatttgataggtaaacccttttactaaaagaaaataatcggtatattggaatttatgattgcaatgaatgccatttagaaataaaataaggagatggcttttttaatagcttaaaaatgcaaggcaaactttcgtacatagatggtataataaaacgtgtttttacaacataccaaagcatttaagcgaggaagtcattgaacaacaaacggataaaaaactcggaaccttcttcgggaggaagtacggggagaggcggcgtccttcgagagaatcgcgcgtgtggctgtttttccagtttgaaccagacgacaaggggagtgaagaagtggactttgttattgaaatgttaggaatcaggaaggaattctctggatttgtagcaaatgataacattaccttacagttaaagcagggagaaattcatgctttgttaggtgagaatggcgcaggtaaatctacgctaatgaatgtcttgtttggtttatatgaaccagatggtggcgaaattcgtgttcgtggtacaaaagaaaatatcaatagcccgaacaaagcaaatgagcttggaatcggaatggtccatcagcatttcatgttagtggataaattcacggttgcagaaaacatcatccttggtaaagagccaagcaaactcggtgttatcgaaaagaaaaaagcgattgaagaaattaaagaaatttctgaccgttacggcttgcgagtagatccaaatgcgattgtacgtgatatctcaatcggtatgcaacaacgtgtggaaattctaaaaacactataccgtggcgcagatatcttaatttttgatgaaccaacagctgttttgacaccccaagaaatcaaagaattgatccaaattatgcgttcccttatcaaagaaggcaaatctatcattttgattacacataagctgaaagaaatcatggatgtttgtgatcgtgtaactgttatccgtcgtggtaaaggtatgggtactgttaacgttccagaaacaactccacaagatttggctaatttgatggttggtcgtgaagttgtctttactacagagaaaatagatgccaaccctggcaaagatgttttagaagtaaaagatttagttgtaaaagaaagccgcggagttgaaagtgttcgagggcttaatttgactgtcagagctggcgaaatcgtcggaatagctggagtcgatggtaatggtcaaagtgaacttatttcagcaattgcaggcctttctaaagtaactagtggtagcattcttcttaatggcgagcatatcgaaaacaaaaaacctcgtaaaattacggaagctggtttaggacatattccagaagaccgtcataaacatggtttagtactcgaaatgtccctaggagaaaatattgctttacaaacatattataaaaaacctatttctagcaaaggtttcttaaatcataaagcaatgtacgactttgcgcgtgagttaattgaagaatatgatgttcgtgcaagtagcgaatacgtagcagcaaaatcactttctggtggtaaccaacaaaaagcgattattgcaagggagatacaccgtaatccagatttcttaattgcggctcaaccgacacgtggactagatgttggtgcaattgaattcattcacagacgcttgattgaacaacgagataacggaaaagctgtattacttatgtcgtttgaattagatgaaatcatgaatgttagtgatcgtatagcggttatttacgaagggaaaatcgttgctattgttgacccgaaagagacaactgagcaagaacttggtctgatgatggctggttcatccaaacaggaagcggaaatgggggagaaagagcatgtctaaacgactacaagcattagttatcccagttacagccgttatccttggacttatctgcggtgcgattatcatgcttatttttggatatgacccaattgcaggttattcagcacttatagaaggtgttattggcgaaaatttctatataggtgaaacaattcgtcaagctacgccatacattttagttggtctatcagttgcagttgcatttaaagccggacttttcaatattggtgcggaaggtcaaatgctgatggggtggttaggttccattatcatcgctgtaaactttgatggattaacaaaatggattcatttaccacttgcaattattactggtatggtatttggtgcactttgggcattcatcccaggtattttaaaagcaactttacgtgtgaatgaagttatcgtaacaatcatgcttaattatacggcactttatattttcaactatgtcgtacaaaatttacttacagatggtttggataaaacgcaagaaattcatgcgtctgcgtctttacaatccgaattattacaatcacttacagattattcatcgctacattggggaatattgatagccctaggttttgcacttattatttggttaatgttaaacaaaactacttttggttacgaaatcgaagcagttggatttaacgaaaatgcatcgcaatatgccggtatgagtgtaaagaaaacaattatcttctccatggttattgccggagcgcttgctggtctaggtggcgtaatggaaggtcttggaacatacggaacggcttatgttttaacttcttctccagggattggttttgacggtatcgctgttgcgttactcggaggaagttctccaattgggattgtcttctctgccatcttgttcggtgctctaaaagtaggagcactaaacatgccagcagttgcgggtgttccaaacgaattagtcaatgtaattatcgctctgattatcttctttgtggcatccagctacattatccgctgggcgatggcaaaatttaagaagggggcgaaagcagaatgacagccattttagcgacaattgtttctagtacactgcttatggcaggcccactaatttttactgctctcgggggcgtttattcagaacgaggtggtgtggtcaatattggactagaaggtatgatggttatgggggcattctcggctatcgtcttcaaccttactttccaagatacttttggcaatttaactccttggatatcacttatcgcggcgatggtcgtcgggggattattctctcttgtacacgccgttgcaactattaatttccgcgctgaccacgtaatcagtggtgtagcgattaactttttagcaactggtctatctttattccttgtaaaagtaatttacgataaaggccaaacagatcaaattaagtactactttggtaaaccggatattcctgttttgagtgatattccagtcattggtgatattttcttcaaaaacattccggtcatgagttatgtggcgattattttcgctatcgtttcttggtttattatttataaaacacgctttggtcttcgtcttcgttctgtaggggaacatcctcttgcagcggatacaatgggaatcaaagttcgttggatgagataccaaggtgttatcatttctggtattcttggtggcctaggtggcgcggtttacgcccaatcctttacacttgatttcggacatgcaactatttccggtcaaggttatatggcccttgcagcaatgatctttggtaaatggaatccgcttggagcgatgggagcagcgattttcttcggttttgcgcaatgtttggcaattaccggcggatctctaccattcttcaaagatattccagacgtttacttacaaattgcgccttatgtattaacaatccttgcgcttgttggctttatcggtaaatccgaagcaccaaaagcagatggcgtgaactacattaaaggtaaataatatgagcaaacagtctagattaaattctaggctgtttttttatgctagaaaattgtgtgtcacaacaacttacgatacaataggaaagtgagatcattgcttgaaaggagcattataatgacagacaaaatatttcaagaaaaagttggcccagttgccctgacaattgttccaacccaaaaatataaatccaataagattgtttttaaatttcgcgctccattagaaagagaaacagtaactaaacgggcattactttcgatattattagaaacaaatagtgaaaaatatccaactcaaacagatttcagaaagcaattagcgaatctttacggtgctaatttttatacaacaacagctaaaaaaggcaatgaacatgttttaaccgttattttcgatatgattgatggacaatatgtatctgacggaaatcatattttagaagatgcttttgcatttatggaacaagcattattccgcccaaacgttgcaaatgatgcgtttaatgaagaaacacttactcgtgaaaaagaaaatttaaaaagtagcctagagggtatttatgacgataaaattcgttttgcttccaaacggttagtagaagaaatgttccgcgatgatgagtttcgctttggttcagctggtgttttagaagatattgatgctatcacagcgaaagacttatatgaatactatttacaattcattgcagaagataccatcgaaatattcatttgcggagatgtaacaaaggaagaagtgatgccacttatcgaaaagatggctttttcaccccgtcctgagagaaaaggcattttttatacaaaagaagctccgaaagaagtacgtgtcatccatgagcaacaagcgattaatcaagggaaacttgtacttggttatcaaacagaaaccttgtttggagatgatgatttcgttgcacttcaacttgcaaatgggcttcttggcggatttgctaattcgaaaatctttatcaacgttcgcgaaaaagcgagcctagcttattatgcttctagccgcatcgattctttcaaaggatatatgattatttcggctggaattgatgaagttaattacgagcaggcactgaagattattgaagaacaagtagtagcaatgaaacaaggcaattttacagatgatgaattaaatcaaacgaaagaaatgctcattaaccaattgcttgaaacaaatgatcaggcgcaagggttaatcgaacttgtatataacaatgttctgcgtgatgcaaacttagacttagaaaattggattgcaaaaatcaaacaagcgaccaaagaagaagtagttgctgccatcaataagattaaaccagatacaatttatttcttaagtaagggaggagaggaacttcatggaaaaaatcacatttgagcaagtaaaagaagcagtctttcatgaaaaaatggcaaatggcttacaagtatatcttcttccaaaacaaggatttagtaagacttatgctgtgttcacaacaaattacggtgcaatcgataataacttcgtcccaattggcgaaacagaatttactaaagtaccagatggtattgcccatttcttagaacataaaatgtttgaaaaagaagacggcgatgtattcttcaaatttggcgaaaaaggtgcttttacgaatgcatttacctcgtttacgaaaacagcctaccttttctcaagtacttctcgagtggaagaaaacttggaaacgttaattgactttgtacaagagccatatttcacagaagaaactgttgaaaaagaaaaaggcattatcggacaagaaatcagaatgtatgatgatgaccctgatttccgtgcttattttggcgtaatcgaaaacatgtatcataatcacccagtaaaaatcgatattgctggaaccgtagagtccattgccgaaatcaacaaagatttactttatctttgctataacacgttctatcatccgagcaatatggtgctttttgttgtagggaacttagaaccagaacaaatgatggaccagattcgtgccaaccaagcaaaaaaagaattcgctgaagctgcgccaatcaaacgtcatttccctgaagaaccaaagacggttgccgtaaaagaacgcaaaattcatttccctgttcaaattgctaagaaccttgtagggattaaagaagatattggctccttagaaggccaagctgctataaaacaagaaattattggagatgtagccttggaaatgctttttggcacaacatctgccacttacttgaagttatacaacgaaggaatcattgacgatacatttggctatgattacaccttgcaagatagcttctcgttcgtattagttggtggagacgccaaagatccagataaacaaactgcaaaaatcaaagatgcaattaaagaagctgccaaaaacggcttaaatgaatcagatttagcactagtaaaacgcaaacgaattggtcagtttttgcgctcgctaaattctcctgagtttattgcgaaccaatttagccaatacgtcatgaaatcagcttctttattcgatattttacctttaatggagaaagttacattagaagaagtaaatgcatttgttaaaaatttggataaagaagagcgaacaacaagtttccaattacttccagaagaataaacaaattatgtctttttttagtagaaaaaatagcataaattgctgagtcatgctatcataaaagaaatagactggaaagggttgcctttttttggataaagagataaaatatgcttttgtaacaggggctagcggagaaattggacaagcaatttgtatgtcacttgcgagagctggttggaacttgtatcttcactattatcaaaataaagaaacagtagaaaaattacttccgctcctacaagcagaagaagtagatgttatcctgattcaagctgattttgatgatttagcaagtttgacagagatagaaaagcaagttttccagctagatgcctttattcatgcagcggggcacgcccattatagtttattccaggatactacagatacaaatattgctgaattatggaacgtgcatatgtttatgccaatgagattaatccgtacttttatgccaaaattaatgaaaagtagccaaggaagaattattttcattagttctatatggggagaagtcggtgcatcaatggaagtagcgtattcaactgtaaaaggtgcacaaatagccttttgtcgtgcgctaagccaagaggtgggactttctggaataacagttaatgcagttacgccaggagttgtagaaacaaaaatgatggaccagttttctgaagaggagaaagacaatcttcgtcaagaaatccctttaaatcgttttgcacaaccagaagaaattgcagaaactgtagcatttttgacaagtaaaaaagcaagctatatcactggagaagttttgcgcttaaatggcggttggcttatgtaattttagtaaaaaaatggaaatttgaaattagtaatggtaggtgtttaattttgacagaactcggtgataaactgaaacaagctagacgtgaaaaaggactcagtttagacgacttacaacaaataacgaaaattcaaaaacgttatttggtagcgattgaagaaggaaactatgctgtaatgcctggcaaattttatgcaagagcatttattaaacaatacgcagaggcagttgggctagatagcgcaacacttttcgacgagtttgaaagcgaagttccggaaacgccgcaacaagaagtagtaaataatgagccaacacgggtacaaagtaaaagaaatccaatgcctgcacaatctgtaggtaatcaagcgaatacacgtaatcgtttttttgatatcttaccaaaaatccttattgccttatttattgtgtttattcttttcattgtttggtttttcttgcttaataaacaagacaactccacagaaaaagtgaaaacagatacaaataatcctacagtaaaagtagaagattcgacaaaaagcaaggatacaagtaaagacactgagaaaaaagatacgacaacaaacgaagataaatccacagaaacaaaggataaaaaggaagatacagccaaagaagttgaagtgactaaaggagaaacgtctggtaacgccactacgtacacagtgaaaaatacggacaaaatgactctatcacttagcgccactggtgattcttggataggtgtttccgatgcgaatggtagtacaattcaaaatgaaacactatcaacccaaaatccttctgcagaaattgatttaggtgataacaagacagtttctatcgtaattggaaattctcctgttacaactgttaaaatcaacggcaaacagctggaacttgctcctgatcttgttaaacaagttttaacaatcaatttagaagcaagcgattctagttcagatgccgaataatttgtttatatggcgaaatctactcattagatttcgccaacattttttataattacatactttttaaatgtaaaaaaggagagaaaaagatgaatttacctaataaattgacggttatccgaatttttatgataccaatttttgttattctttgtgtagtaccatttgactggggaagcgttacttggcttgattcaactatcccagtgacaagtttagttgcaaccattattttcatcgtagcggcccttacagattggtttgatggacatttagcacgtaaatataatttaataactaacttcggtaaatttgccgatccgatggctgataaactacttgtagcagctgcatttattattcttgtagaaatgcatatcgcgccatcttgggtagttattcttattattagtcgtgaactagctgttactggtctacgcttacttttagttgaaggcggagaagtgcttgcagctggtcaacttggtaaaattaaaacattcacacaaatgattgctattccgcttatgttattaaataactttccatttgcttggacgggtattcgtgtagatttagtgttcttgtatgtatgtgcattctttgcagtatggtcaggaatcgattatttctacaaaaatcgtggtgttttcaaaggatctatgtaataaataaaaaaagcataccgttgtgtgctttttttctatacaaaaaatcgaattggagatgaatcaagatggcaagtgcagaaatcattgcagtaggaactgaactattacttgggcaaattgttaattctaatgctgcgtttatttcacaagaattagctgctgacggaatatatgtatatcatcatacagtagttggagataatccaacacgtttaaaagaagtaatcgaaattgctgaaaagcgcagtgatattttaatctttactgggggacttggaccaactgaagatgatataacaaaacaaatcttagctgatcatttacaaaaacagttagtagaagatgaatatcatatgaataaaattaatgagtatttcgcttccagaaacagaaccatgaccgaaaacaacaaattacaagcggttattattaaagattccgtggtattaaataatgactacggctttgcagctgggatgtacttaaaagaaaataaccatacttacgttttgttaccaggaccaccatctgaaatgaagccaatgtttacaaaatatgctaacccacttcttttaagtgaaaatggcaatcaaaatattttagaatccaaaatcatgcgtttttttggtattggagaatcgcaattagctgctgatttaaacgatttgattgttaatcaagtcaacccaacgattgcgacatatgctggtgataatgaagtcgtggttcgtatcacagcgacagctaaaacaaaagaagaagcaagttctcttgtgaaggatacagaggaggaaatattgcgccgagatggcacttttttatatggatatggagaggtttcattgcctgaattagttacggcgatgttgcttgaaaaagagcttaccatctctgctgcagaaagttttactgctggtttatttcaagcggaaattgctcgatttcctggtatttcgaaaattttcaaaggtggtatggtgacatacagtgaagaaacaaaacaatctatattacaagtatcacctcaagtaataaaagaaaaaggcgttgttagtgctgaatgtgcgaaggaaatggctgaaaatgtaagccgcctttgtaagacggatattggaatcagttttacaggtgttgcaggcccggatagtctagaaggccatcctgctggcactatttggattgggctgagcgttaaaggtcatgaaacagaggcttttcagtttgtttatggaagagatcgaaaccataatcgccgacgtgccgtaaaacaaggctttcagttaattaagcaatttttagacgcaaattagtcgttttctctagtagaaaatgaataaaatgagcaaaaaaagcggaaatgaatgacaaaaaagtattagacgaacgctggaaatcccgttataatgaggaagaaagcagccggtgcttacacaaaataaaaaatacgaataaatgttcgctttttgcttgcttctcactctaaaatgcgttatagtaattttaggaaaacattctgactgttttttgagagagaagaagtagaaaaacagctattaggatatttattgaaggaggcaacaatgtgaatgatcgtcaagcggcattagaccaagctttaaaacaaattgaaaaacaattcggtaaaggctccattatgaaattaggggaacattcagatcaaaatatatctactatttctagtggttcattagcgttagatattgctttaggagttggcggataccctcgtggacgtattatcgaagtatacggaccagagagttccggtaaaacaactgttgcgcttcatgcaattgcggaagtacaagcacaaggcggaacagcagcatttatcgatgctgagcatgcgttggatccggcttatgctaaaaacctaggtgtaaatattgatgaattattactatctcaaccagatacaggagaacaagctttagagattgctgaagctttagttagaagtggtgcagttgatatgttagtaattgactccgttgcagcacttgtaccacgtgctgaaatcgaaggcgagatgggcgatgctcatgttggattacaagcacgtttaatgtcccaagcattgcgtaaactttctggtgttattaataaatcaaaaaccattgctattttcattaaccaaattcgtgaaaaagttggtgttatgtttggtaacccagaaatcacaccaggtggacgtgcgcttaaattctattctactgtacgtttagaagtaagacgtgcggaacaactgaagcaaggtacagatgtaatgggtaacaaaacaaaaatcaaagttgtaaaaaataaagtagcgccaccattccgtattgccgaagtagatattatgtatggtgaaggtatttcgcgtgaaggtgagcttgttgatatggctgctgaagtggatgtaatcaataagagtggttcgtggtattcttataaagaagaacgcatcggtcaaggccgtgagaatgcaaaacaatatctgaaagaacacacagatattcgtgatgagatttctaagcgcgttcgtgaagaatatgaaattgatggaagcagcaaagagcctcttgacgaaaaagaagaaacattaagtttactagatgatgaataaataacactaaatacgtgataggaatttacttcctgtcacgtattttttactattttaaaaaaactaaggaaaataaccgtacatttcattccttttcttgacattgtatgctttgacctataaaattaagttgtatattttatattgctgggagacaagggggaagttttttcctttgaaaatcggcttcaactgaatggggagataagcactcggttgttgatgaaaaatacgcatgtgccagaattctggccaccgacataacaataacgaaaattgaatagcaaaggaggtgtaaggatgacaatcgcaatcacgatcatctccagtttgcttttcttaatcgtcggtctagttgttggttctctaatttttaaatctagtacagagaaaaaactggctgctgcaagggggactgctgaattaattgtagaggatgcgaagaaagaagcagaaactacaaaaaaagaagcattgcttgaagcgaaggaagagaatcataggttacgtactgaaatcgaaaatgaacttcgtgggcgaagaacagagacacagaaagcagaaaatcgcttattgcaaagggaggaaaacctcgaccgtaaagatacttctttaagtaaacgagaagctacacttgaaagaaaagaggagagtatcagtaaacgtcaacaacaaattgaagagaaagaaagcaaactagctgagatgattcaagcggagcagacagaactcgaaagaatttctgcgctcagcaaagaggaagcgaaatctatcatccttaaccaggtagaagaggaattaacgcatgatacagcaatcatggtcaaagaatcagaaaaccgggccaaggaagagtcggataaaaaagcaaagaatattctctcactagctatccagcgttgtgcagctgatcatgtggcagaaacaacggtatctgttgttaccttaccaaatgatgagatgaaaggtcggattatcggacgtgaaggccgtaatatccgcacgcttgagacgttaacggggattgatttgataattgatgatacaccggaagcagtaattctttccggatttgacccaattcgacgtgaaatcgctagaatcgccttagaaaaacttgttcaagatggaagaatccatccagctcgaattgaagaaatggtggacaaagcccgtaaagaggtggatgaacatattcgcgaagtcggggaacaagcaacatttgaagttggaattcattccatccatcctgatttgataaaaattcttggccgcttgcgttatcgtactagttacggacaaaacgttcttaaccattcactcgaagtttcgaaacttgcaggaattcttgcaggagagcttggcgaagacgttacgcttgctaaacgggccggactacttcatgacatcggtaaagcaattgaccatgaaattgaaggaagtcacgttgaaatcggcgtggaacttgctaccaaatacaaagaaaatgatgtggtaatcaatagtattgcttcccatcatggagatacagaagctacttctgttatcgcagtattggtcgcagcggcagatgcactttctgctgcaagaccgggagctcgtagtgaaacgcttgaaaattacatccgtcgtttagaaaaattagaagaaatttctgagtcttacgatggtgtagaaaaatcttatgctatccaagcaggacgtgaagtacgtattatcgttgagccagatacaattgatgatctttcatcttaccgccttgcacgcgacataagaaaacgaattgaagaggaattagattatcctggtcacattaaagtgaccgtcattcgtgaaacaagagcagtagaatacgctaaataataattaaaagatacatcgcaaattaattttgcggtgtatcttttttaatcggttgcctaggtcgagtaagaacggtataattaatggataaacgaaaaagggaggcggagtttttgagtgagtggaaaattttgccgatgcaaaaagaacactattcgggagtagctgcagtccatcaagagggtattgaaactggaaatgctacttttcaagagaagacactatctttagaagcgtttgatgaaaaatatttaaacacttgtcgattagttgtccttatgaacggcgaagtgattggctgggcagcgctgttaccattttcaagtatgcatgcttatcgaggagtagcagaattaagcatttatatagcaaaaagcgcccgtggaaaaggcgttggaaaagcacttatgcatgaaattatccagacaagcgagcagaatgatttttggactttgcaatctttgatttttccggaaaataaagctagcattgcgcttcatcatacatatggattccaaactttatgcatccacgaaaaattaggcgaaatgaatggcgtttttagggatgttgcactattagaacgtagaagtaatagaaacggagaataaacaaaatgaaaatactatttatcggtgatgttgtcggttctatcggccgcgatgccataacagaatatttaccacaattaaagaaaaaatataaacctactatcacggtgattaacggtgaaaatgcagcaagtgggcgtgggattacagagaaaatttataaagattttctggagcttggtgccaatgctgtaacacttgggaaccatacatgggataatcgtgatatttttgaatttatcgatgaagctaagtatttagtgcgcccagcaaactttccagatgatactacacctggaacaggaatggtttttgtgaaaagcaaccagcatgagattgctgtcattaacatgcaaggccgaactttcctagcagatttagatgatcctttccgtaaaatggattatttgatagaagaagcaaaaaaacgcactaatattatttttgtggattttcacgctgaaactactagtgaaaaagaagccatgggttggtatttagatggccgtgttacggcagttgttggcacacatactcatgtgcaaacgtcagataaccgcattctcccagaaggaacagcctatctgacggatactggtatgactggcccatacgatgctatccttggaatggagaaggaggctgttatccgtcgatttaaaacagctttaccaactaggttcgaagttcctaaaacgggccgtgcagtcttgtcgggctgtttaatcacacttgacgaaagcactgggaaagcacaaaaaattgatcggattctcatcaacgaagatcacccattttcctttgattaagaatggagatgaaattttgacagtttcaaaagacgaaatcatgaaaaaagctaccgaacttcgtgatgcgcttcaacaaacggaagaagtatcgttctaccgccttgccgaggaaaggatcaatgcgaattccaaagtagcagcgaaggtttctaaaataaaattacttcaaaaagaagcagtaaacttagaacattatcaaaaactcgaagcaatgaaacaaaccgagaaccaaattgataacgttcgtgcagacattgactcactcccgattgtaacagaattcagacgcgctcaagaagatgctaacgatcttttgcaatcaattacaacagagattacgacaaaagtaactacagagcttgaaaaagaaaattaaccatttaaaactgccaaaacatcggcagtttttttcttttgcggtcgcgggaaaatgaaactttatgctataatgagaggatgaaaaagaagtaagggatgatgagataatgacagaatatacaccaatgattaagcagtacttggaaatcaaagacaaatatcaagatgctttcttatttttccgtttaggagatttttatgagatgttttttgaggatgcactgaacgcttctcaaattttagaaattacattaactggtcgtgaaggtgggacaaaagagaaaatcccgatgtgcggagttccataccattcagcgagcggttatattgatacattaatcgaaaaaggctataaagttgcgatatgtgagcaagtcgaggatcctaaaacaacgaaaggcatggtgaagcgtgaagtagtgcaattgatttcaccaggaaccgttatggatgaacgcggcttaaaagcaaaagaaaataactatattgcttccctttattgctatgaaggcaaagagtatggctttgcttattccgacttatcgacaggtgaattaaaatcaaccgttattgaagctagcgaagatcgtttgattaatgagctaacgacactttcaacaagagaattgattgtttcttcctcggaaaaagaagtgctttcagatgtcatgaaggagcaactaggtttaactttttctgtgcacgaagaagatacgattccagccgaaaacgagaaattagtaacccgccatatgtcattatccgaaaaacgtgccattggtaagttactccattatttaaaagaaacgcaaaagcgggatttaggacatttacaacaagctgtacattacgaaacgagcaattacatgaagatggactactattccaaacgtaatttagaattagcagagtcgattcgtggtaaaggtcgtcaaggtacgctactttggcttctagataatacccaaactgctatgggcggaagaatgcttaaacaatggattgatcgtccgttaatagaccgaaaaaaaatcatcgagcgacaaaatgatgttagcgaattaatggcacactttttcgaacgcttagagctagtagaaaacttgaaaaatgtatacgatttagaacgccttgctggtcgcgttgcatacggaaatgtgaatgcgcgagacttaattcaattgcgtaattcgttatatcagattcctcgtattcgggcgacactgttatcaatgagtagcgagagcctaacagaacttgctgaacaattagatccatgtgaagaattaaccgaaaaattggaagaagcaatcatggattctgcaccgatttccattcgggaaggcgggattattaaagatggctataacagccaactagatacgtaccgcgatgcaagccgcaacggaaaaacgtggattgcagaattagaacgtaaagaacgcgaactaacgggcattaaaacgttgaaggtgggctttaatcgggtattcggttactatattgaagttacccgagcaaacacgcatctgctcccagaaggccgctatgagcgcaagcagacactaacgaatgccgaacgttatatcacgcctgaactaaaagaaaaagaaaaactcattttagatgcagaagaaaaaagcatggaattagagtaccaattattttctgaagtacgagaaatggtaaaagactacatagaacgtctgcaaaaattagcgaaatctgttagtgaaatcgattgcctgcaaagttttgcggatattagcgagaaaaaccattttattcgtccgacattaagcgaagacggttccctgcacgtaaaacaaggtcgtcatcccgtggtagaaaaagtaatgggtgcccagagctatgtagcaaatgactgtgatttagatgaaaatcgggaaattttacttataactggtcccaatatgtcaggtaaaagcacttatatgcgccaagtagccttaacagcaatctgcgcgcaagttggttgttttgttcccgctgaagaagcgatattaccaatttttgaccaaattttcacgagaattggtgcagcggatgatctaattgccggtcaaagtacattcatggtagaaatgttagaagctagaaatgccattgttcacgcgacgaaagatagtttaattttatttgatgaaattggtcgtggaacagctacttacgacggaatggcacttgctcaagcaatcattgaatatatccatgaaaatgtccatgctaaaacacttttctccacccattatcatgaattaactgatttggagaaagaactgcgtggtttacaaaatattcacgttagcgctgtagaagaaaatggcaaagtagttttccttcataaaattaaagaaggcccagcagacaaaagttatggtattcatgtcgctgagctagcagaattaccaaaatcacttattgaacgagcgagtcgtattttagaacaactggaaaatgacgataagaaaatcattatcgctagcgtgaagcagccagaagaagttcacgaagaagtacaactgtcgatgttcccattggagccagaaaagaaagcatcttctaaagaaacaaaactactaaaagaaattgcctccatgaacattatgcagatgacaccaatggacgcgatgaataaattatacgaacttcaaagtaaaatccattaaaaagaaaggcgggttttaaatggctaaacatattgtcgaattaaccgatgctctatccaataaaattgctgccggagaagttgtagaacgccctgcttcagtcgttaaagaattagtagaaaatgcaattgatgcagggagcaccgtcatcgatattttagtggaagaagcgggattaaataaaattaccattattgataacggtagtggcattgaagaagaagatgtcgcaacagcttttttacgccatgccacaagtaaaatcaaaaacgaagcagatttattccgtgtgcatacactagggttccgcggcgaggcacttccaagtattgcctctgtgtcccatttggcaatggaaacttctactggtgaaacaaaaggaacatctatttccttagaaggcggaaaaatcattgaacaaaaaagcggtcatgccagaaaagggacgcaaatcgaagtatcccagttgttctttaatacaccagcacgcctaaaatatttaaaaagtttaccaaccgaacttggtaatattaccgatattctaaatcgcttagctttagcgcatccagatatcagtttccgcttttcgcacaacgggaaacctttattacaaaccaatgggaacggggatttacgccaagtgattgcagcaatctacggtatttcgattgcgaaaaaatcaataccagttaaagcagagtcacttgattttaaaatttctggatatgctgtattaccagaagtgaatcgctccaaccgtaattatatttcgaccatcattaacggtcgttttattaaaaatttcgcattagtaaaagctattcaagaaggataccacacgctcttaccaattggccgtttcccgattatcgttctccaaatcgaaatggacccaattattgtagatgtcaacgttcatcctgctaaattagaagtccgtttaagcaaagaaaaagaactggggcaactaattagccaaatgattaaagaggctttccacaaattgcaactaattccagaaggagagatttctaaaaaacaaaaagaagtccaaaaatccgaacaaattcaaatgtcttttgaagaaaataaacccgcaaaagaaataccaactcttttttcaaaaccgactatccctgaatatgttccttctgatgaagatgctccgcgggaagatgattttattttggaaacaatgccaccttatgaacctcaagcggagcaggaagagcattcgaaagaacgtattccgaaaatgtatccaattggtcaaatgcacgcaacttatatttttgcgcaaaatgaaaatggtttatatatcattgatcaacatgcggctcaggaacgaattaaatacgaattttaccgtgaaaaaattggggaagttagtcgcgaactgcaagaattacttgtaccaattgtgcttgaatttccagcggatgagtatgttcgtttagaggaacaaaaagcaaaattagaagaggtcggcgttttcctagagaacttcgggcaaaatagttttatcattcgtgcgcatccaacttggtttccgaaagaccaagaagaggagatgctccgtgaaattattgatgaagcgttatccgcaccaagcataagtattcataaattaagggaagatactgctattatgatgagttgtaaaaaatcaattaaagcaaatcattatttaacaacacaggacatggaagcattactcgatacactgagagaagcaagcgacccgttcacttgtcctcatggtcgtccggtgattatccaatactcgacatatgaactagaaaaaatgtttaaacgtgtgatgtaaaagaggaggaaataacttggagttaccattttccggtcaatcaatcatcccagctgcacataatcaaaaagatatggaaaaaattttagagcttggcctgacatatatggtgatgctggagacgcatgtagctcaactaaaatcattagtcaaatacgcacaagccggcgggaaaaaagttttattacacgccgatttagtcaatggactgaaaaatgatgactacgcaatcgactttttatgtacagaaatttgtcctgatggtattatctcgactagaggaaatgccattatgaaagctaaacagcacaaaatgctagccatacaacgtcttttcatgattgattcaagcgcctgcaacaaaggagtagcattgatacaaaaagtgcaacctgattgtattgaacttttaccaggtattattcctgagcaagtacaaaagatgactcaaaagcttcatatccctgtgattgcaggtggattaattgaaaccagtgaacaagtcaatcaagtaatagcaagcggagcaatcgcagttacaacatccaataaacatttatggtaaataaacagctaagttgtgtattaataacgacttagctgtttttatgaaaaacaatgaaaacgctatatttccctgttgagcattgctagacaaaggtttaagccttttctaactgttctatagaaaacagccaccttcaaactgtaccataacagagggggcggtttgaaatggtacagcaaaaataaacaattaaaataaaaacaaaattagaatcataataaattagaggaatggctatgcaaaggggatattaagcattttaaattaaaaagacacaaaaaagtcataaaaaagtttgaaaaatattgcacaaaactgtagcattttccggagaatatgttatgataacagtgtagattatttataaattagtttgctcaaaaaagcacgctcgagaatgaacaataaatggaggttatatgatgactgaacaatggtatgaattcgcaggtggtaactggcaacaagaagtagatgtacgtgactttatcttaaaaaactatcgcttatatgacggtgacgacactttcctagttggcccaaccgaagcaactacaaaactttgggatcaagtaatggacttaactaaaaaagaacgtgaaaacggtggcgtactggatatggataccaaaatcgtttcaaccatcacttcacatgacccaggatacttaaataaagatttagaaaaagttgtcggcgttcaaactgacgtacctttcaaacgcgctttacaaccattcggcggaatccgtatggcagaagttgcagctgaatcttatggatttaaagtagacgaagaaattagccatattttctctgaataccgtaaaacacataaccaaggtgtatttgatgcttacacagcagaaatgcgcgcagctcgtaaatcaggcgtaattactggtcttccagatgcttatggccgtggacgcattatcggtgactaccgtcgtgtagcactttacggtgtagacttcttaattaaacaaaagaaacaagatttaaacaatacaggtttgcgtacaatgagcgatgacgttatccgtcaacgtgaagaacttaacgaacaaattcgtgctttaggtgaattaaaagttctaggtgaaaaacatggtttcgaccttggtcgtccagctaaaacagcacaagaagctttccaatggttataccttggttacctagctgcaattaaagaacaaaatggtgctgcaatgagtttaggacgtacatctacattccttgatatttatgtagaacgtgatcttcgtaatggcctaattactgaagaagaagcacaagaaatcgttgaccactttatcatgaaattacgtcttgtaaaatttgctcgtacaccagattacaacgaattattctctggagatccaacttgggttactgaatccatcggtggtattacggaagaaggcgttccacttgtaacgaaaaactcattccgtttcttacacactttagataacttaggacctgctccagaaccaaacttaacagtactttggtccactcatttaccatcaggattcaagaaattctgtgctaaaatgtctatcaaaacatcagctattcaatacgaaaatgatgatgttatgcgccctaaatggggagacgactatgcgattgcatgttgtgtatccgcaatgcgcgttggtaaacaaatgcaattctttggtgctcgtgccaaccttgctaaaacactactttacgcaatcaatggtggtatcgatgaaaaatctaaagcacaagttggaccagcttatcgtccaattgaaggtgatgtattagattacaaagaagtaatggaaaaatatgatgcaatgatggaatggattgcagaactttatcttaatacactaaatgtaattcattacatgcatgataaatacgcttacgaacgtatcgaaatggctttacatgatacagaagtattacgtactatggcaactggtatcgctggactttctgttgcagctgactccttatccgctattaaatatgcaactgttcgtccaattcgtgacgaagatggcatcgtagttgattatgaaatcgaaggcgactatcctaaatacggaaataatgatgaccgtgtagatgaaatcgcagttgagcttctaaaaacattcatgactaaagtaagaaaacataaaacttaccgtgatgcagttcacacaacttctgttcttacaatcacttctaacgtggtttatggtaagaaaactggtaatacaccagacggacgtcgtgcaggcgaaccatttgcaccaggtgcgaatccaatgcatggccgtgatacaaaaggtgctctagcttctctatcttcagttgctaaacttccttacgaatatggtcaagatggtatctctaacacattctctatcgtaccaaaagctttaggtcgcgaagatgaatctcaaattaataacttagttgcaatgcttgatggttattccacaaaaatgggacatcacttaaacatcaacgtattcaatcgtgatacgttactagatgctatggatcacccagaagaatatccacaattaactatccgcgtttccggatatgcagttaacttcatcaaactaactcgtgaacaacaattagatgttattcaccgtacaatgcacgaatccatgtaataattaggcgagaacgcttcgacaaggattgctcaccgtagcaatccttgttatttaggaaaggaagaggagaattatgacagaggttttaggaagagttcattcagtagaaacaatgggaacagtagacggtccaggtatccgctttattgtttttatgcaggggtgtttacttcgttgtcaattttgtcataatcccgatacttggaaaattggtactggcacagaacgttctgcgcaagatgtatttgacgaagcaattaagtataaagagttttgggatgcttctggtggcggcgttacagttagtggcggggaaccattgcttcaagtagatttcctaatcgagtttttcacgctttgtaaagcagcaggagtgcatactacaattgactcttgtggtggttgtttcacacgtgatcctgaatttatcgagaaattggaccgtttgatggaagtaacagatttaattttactggatattaaacaaatcaacccagaaaagcatttaaaactgacaacgaaatctaatgctccgataattgattttgctcattatttacgtgataaagagcaaccaatttggattagacatgtgctaattccaactaaaacagatgatccagaagatttaacaaaactccatgaattcattcaaacacttccaaacgtaaaacaagtggatgtgcttccataccatacaatgggtgtttacaaatggaaagaaatgggcattcgttatccgttagaaggaatcgaggcaccagaagaagaagtggtagcacttgcgaataagattttagaaactagtagttataaatagcaaaaaccggcgaatattaagttcgccggtttttttatagtattttatacatttccgcacaccattttaattctgtttgaatcaaatctaatcgtcttgcatagacttgataagacatgttttttagcttgtcttgcttggtttttaaatcaaataatttaacgaaatgatccagtgtttcttcaatcaaacctaattgttcttttaaataactttctctttcttgaataagtcccttggttctggcattatttagccagtcgagctgtactttcgttgtaaattcatctcttgtgacagggattttaagtggtgtttcagaccattcaagcaaagagtctaagccagattgtgtaatagtataaacctttttatcaggttttttatcttgggaatgcttatgaacaactaaaaaacctgctttttctaacttagataaagaagggtaaatttgactatgatgtgtattttgcataattcgaagccggtttgcgagttcataaccactagaagcttcacgagcaatcatttgtaataacgtatattctaagacatttggtatcatacaatagcacctctgaatttctatttaatcttattgtaagcgataaacactaataagtaaaatggttgcatatgtaataagttatatatgtaaatattgacattagtatttatcaagcgtaatataataattgagttttatttggaaagggaagtgtagttgtattatgatgacagacaaggaaatgaacacggggaaatggataacagcggcagcgagtttgcttgcttttatgggaataggggttgttgatccacttttaccttctattgcagaaagtattggggcatctcactcgcaagtagaaatgttattcaccgcttatatttttactatggcgattatgatgattccaattggtatcgttgcaggaaaaatgggggataaaaagttaatcgttatcggactatttattgttactatttttgctttattatgtggtttatctgatacaattggtgctttatctatttttcgagctggttggggttttggtaactccatgttcatggctaccgcgatgacaatgctcattgctttatcagagacgccaggccatgcaattgggatttacgaagcatctatgggccttggaatggcatttggaccactactaggaggtattctaggtaatatttcttggcgctatccattttttgccacagcttgtttaatttttatcgcatttttactcattttatttaaagtgaaagaaccgaagaaagtcgcgccagcacctacagagaaaaatgaggttgctatcaagcaaatgctccatttgttcaaatatcggccatttttacaaattgcttttagtgggatgttttattattattgtttctttacaattttagcttattcaccgcttgttcttggcttatcagcaattcaaattggttttgtattttttgcttggggattatgtttggcacttggttcagcaaaagtatcacacgcgttagagattcgttttaatagcaaacaaatcttaaaaggatctttactggcatgtgctgtcatcttagctttacttggctttattgataatacagcagtggatattggtttaattgttatctctggactaatattaggtattaataatgcgcttttcacgaccactgtcatggaacattcaccttatgcaagaagtgtaacgagtggagcatataactttgttcgttggttaggcgcagcatttgcaccgctttgttcgggattacttagcgaagcacttggtatgaaaatgccatttatcgttgcaagtattatttgtttggctggtatgggattactatttattaaactaaaaccagcacattttaccttacaacaatctacttctataaaaagtgaataaaatcaagagactgagtaacctggctcagtcttttttatgctaataattaattatttaatgtttatcattaaaaaacattgacttttatgctttctactagttataatttagaaaaaaagggaagtgaatgtacatgaagctaaaacgattacaaaaaatgagttattttctacatattgcgcttaaaattttatcgattagttctgttataatggttattagcgtcgttttaatgaggctttttagcagcaaaaatgttatgataaataaactagaatcagatactatattttattttcaaacggaactttttgttggtgaggataacctgcaatttgttcaaacggaggaatggatcttacttggtgttgcagctttttctagtattataattgcttatttattatggactgcaagtatgatttttaaagatttagctactaattttacgccctttagtaatattactgttagtagattacggagaattgctgttttaatgcttatttacgcactagtaccgcaaattatttattctattttacatactgtgcttatacctggttatagcattaaatttgggctaaatatgtcatttttctttgcgcttattttttattgtttaacagaaatatttcgttatggtgcatctttgcaaaaagaatctgacgaaactttatgattggagcgaaaaaacaatggcaattgtattgaggttagatcgagtaatggccgaccgtaaaatatctttaaaccagttatcccaagaagttggtgtagcaaatgtaaacttatccaaaataaaaactggtaaagtaagcgccattcgattttctacattaaatgaaatatgtaaagtcttgagctgccaaccaggtgatattttagagtatgtagcggatgactctgttgaaaacgaactttaaatgcgttagatttgtcatagtcagataaggagtgcttaaaatggataaatataatgaattgcaaactgtattaaaaaacaaagaaaaagtgttgataatcggtcctaatggtgctggtaagtcgacttttgctacagaacttggaaaacattatgattttgaagtttgtcacttagataagcttttctggcaggaaaattggaacgctgttgcaaaagcggattttgaggataaagtggacaacattatgagttctaaaaaaaagtatattatagatggtgattatttctttaatttggagaaaagactcgaacatgcagatttagttatttggataaaaattccattgttcctgtgtgtagcaaatataattaaaagaagatttaaatacatgacgaatgtgcgaccagatgtaactgaaggctgtgacgaaaaattaaatttatcatttttgctgtatgctttaaagtataataagcgttctggaaaacaaacgaaagaattattggataatgtgtatgataaagagctgtttgtaattgatagttataagaaattgaagagttattgctgataaatagcccatgaatgcttgggataggtgtttattggttgtttgcgataatacgtattacttcctataatatatattatgtaaactagaaaatttaagattaagtaagaggaaaagcattgcctcctcttacttttaaatacgcttttccaacttttataaaattattatctatcttactaagaattggataaaacaaaactatttaattacaaaagccttaatcataataatgattaaggctaaataaaacttatttcactcgttttcttcttgtagtaaagatataaactccgctgattaacaaactaacaccgataattaatggtaaattattttcgctgtcacctgtttttggtaactggagagctgtgcttgttttacctgtttggtttacagttttagtggtattcttttttgaaatatttttgtttggtacagttgatgtggctggattaactggttttacagggttaattattggtttatctgggttaaccggagttactggtggcgtgataaccgcgtcatctttactatatacatactctacttcctgactatcactcgtgaaaacgctactgtggttacttggtgttttagttaatttatagcctttaaaagattttgcttctgtttcgaaagttgatccaatgtctccttttaaaataactggatcagcaagttgatttcctttagtgtctttatacgtaacagttacatcttttgcgacttcatcaggcgttgttatttttttatatttgaaaataacggattgtgtttggtcggtgtatgttccggattgatttgatggtacttggcttaattcgtagccgtcgatttcttttacttctgcttggaaagtcgtacctatttttccagaaagtgtttcggttggggcgatagattcattagttgcttcatttatatattctacagatacgtttgccccttctactgctgttttttcatatacgtaatttatttgtattgtttcagtgtttgttgtgtaggtgcctgttgcgtttgttggtgtttcttttacttggtagccatcaattgcttttggagatgttgtataagtttcaccgagttttccggataatgtatcggatgttgcaagtgtttggtttgtttcgtcgacataattaacttgtatatttgccttttcaattggtgagaaaggtccggctaatttgtatgattcttgtccaggataagcaactggatcaagtacgttaccagtgatggtaaaatagtttagtgtatctccagcttccagtgttttaggtaattttagacggaaattcacgtcattttcaaccgtatagtcggtgatattatattgtttattgttaaaaagcacataagctgcattgccaggataatgcataggtacttcttgttgtaattttccggtaatatagtcatctccaatatagagttgatccacttgtggtgcaggtaaattaagcattaaaggtgctgcttttgctgaaaaaggattaaaagtgatacttaaaattgtcataaatataataaaggtaaataaagattttttagcgtgcttcataatgtcctcctgcttgttagaataattacattctagcaccaaaactgtataaatacttattttgtaagaagtttcacaaaataagttgtcggtttgttcacaaaaaagacaaaaatgaaatcataaaaagctaaaatcaactattagctgaccttagctttttattaatattaaatgtactactatcatgctctttcaaggataattgcaatgccaataccaccaccaacgcacaaggaagctaccccgatatgcttgttttcatgttttaattcatttaacaaagaggcaataatgcgtgcgccggaagctccgattggatgacctagcgcaattgctccaccgtaaatattaagtttctcttcgggaattttcaaatcacgagccactgcaacagactgcgatgcaaaagcttcgtttaaatggaataaatcaatttcatcgatagaatatccacctttagttaaagcttcatttactgcatagtatggcgcgtaacccataagtgctggatcgacaccaacctcagaggttactttgattgttgcgatataaggaatgttttccgcgactgccttttctttcgacattaaaataattgcggaagctccatcattgataccggaagcattaccggctgtaacagttccaccttctttgaatacgcttttcaacgtagctaatttttctagagttgaattcgcgcgaatcgtttcatcggcttcaaaaaatgaaccgtctggaagttttacaggaataatttcttcttcaaaaagttttttttcttgtgcacttgcggccttcatttgagagttatgagcaaattcatcttgttcttctcgggttacggagaatttttccgcaacattttctgcagtaattcccatgtgatattcgccgtaaacatctgttaaaccatcaattaacatgctatttcttagtttttttggattgatttcttcaccggctagctcgggattaagtaaaagtggtgcttgggacatattttcggtccctcctactgctacgatgtcagcttcccctagttgaattgcttgtctgccaagcataaccgattttaagccagatccacacacttcattgattgtgactccgggtactttataaggaattcctgctttaatagcgatttgtctagctacattttggccaagtccagcttgtaatacattaccaaaaattacttgatccacacgttctggagcaatattggctctttctaaaacaccttttagagcggtagcaccaagatctactgcactgatgtctttcaaactaccaccgaattttccaattggtgttctaactgcatctattataactacttctttcatagcaatctcctttaaatgtaatctatccgtattatatcatgaaactagctaaaaactcactagattaagcccaatgtattgtattttgtgcatttttctactaaaattaaagtacttacaaataaaatataaaggacttgagcttacatatgaaaattggaattgataaaataggtttttatactcctgcattttatgttgatatggtagaacttgctgaagctagaaatattgatcctaacaagtttactattggcattggccaagataaaatggcttttgctccgattacgcaagattcagtaacaatgggcgcaaacgcagctttacaaattttagatgaagaagatttgaaaaaaattgatttagttattttagcaacagaatcaggaattgacgagtcgaaagctggtgcggtttatattcaccgtttgctaggtattcagccgttctctcgtgcaatcgaaataaaagaagcttgctacggagctactgcaggaattaatttagcgaaagattatgtagcgaaacatcctgatagcaaagtgcttgttatcgggtcggatattgctcgttacggcttggcaactggcggcgaagcaactcaaggagctggagctgttgcgatggttattgccgctgatccacgttgtatcacacttgaagatgataatgtattctatacagaagatattatggacttctggcgcccagtttactccgaatatgcttgtgtagaaggtaaatattcgacagaacaatacatccacttcttccaaactatttgggaaaagtattcagcgaaatttggtaagaacttagaagattttgcagctatttgtttccacttaccatatacaaaaatgggtaaaaaagcgttagatactattattgaaacagctccaagtgatgttcaagaaaaattgctagaaaattatcgtctaagtacgctttatagccgcaatgtcggtaatatttacactggttccctttatttaagctttatttccttgttagacaatcaaccagatttacaagcagaggataaaattggcttctttagctacgggtctggtgctgttggcgagttcttccatggagtgctacaacctgactataaaaaatatatccgtaaagacgaacatgcggaattgctagcaaaccgtacgaaactcgctattccagattatgaaacgaaattcaaacaacaattacctaaagatggttcgatctttgaagtggatcctgctagtgacccagcagccattgtattaactggaattcaagagcataaacgacaatatattaaaaaataatcaaaaaaaaccgactaggctaaatcagctagtcggttttactttgagctctttatattttcttggggataaaaaacgaatcacgatgtaaccaagcatgatgccacaaacatttaggaatacgtctccagtgtcaaagaatcctacatgtagcatgtactgcgccccttctactgcgaatatcaacattccagctgatagtaacgcggtgaaaaagcctaatttcttgagtaaaaaaccaattggtagaaaggctaatacatttcctacgataatgacacgtaaattacctgataaaaatgtatcaacaaacccaaaagtatcacttgaaaatccttgtgtgtcggaagcttttccgaataataaacaaagaagaatactgaaataaataatgtagcaaaaaacgagcaatgccttatttattttccaatttactaattgtactgcgacaaaatagagtaaaatcgccgtgatgccgatcgtaatgtagcccatatgactaactgtggccattacgtgctttaaataaaaataaagccatccctggaaccaggaaaaatacatcgttactgcagcgaatatcgaaaggatcggtaatataagaattataaagtatcttttcatcctggcgtcctccttttcaaaggctacctcaaggataacatttgaaaataaggactttcttaaaaggttttaaagattttctaagtttttctcttttacgaatacaaataaaataccaccaacgaggaaaagtacaattaaactagccacaccgtattgcgtttttccggtaatttgtgtgattacccccataagggccggtcccatgattgctgaaaatttcccgaaaatattataaaatccgtaaaactcattcgaacgctttttaggaataatttttccgaagaatgatctacttaatgcttgaataccaccttgcgaagttccaactaacattgctaatatccaaaaatcaagcgcagatttcatgaaaaccgcataaatacatataataatataaacaaaaatcgcggtaaagataagtggttttgcactgaaacgtttagctaaatacccatataataaagtgaacggaaatgcaacgagttgcgtcattaaaagtattaaaattaatgttgtctgagaaattccaagatcaatcccgtacgatgtcgccatgcggaaaatcgtatcaaccccatctatgtagaagaaataagcaattaaaaagataacaatatttttatgttcactaatgtggctaatagtatgaaataatcttttaaaactagttctgactggacgttttaccgctggaatatagtgaatttgatgcacgttcttccacatgggaatcgtgaaaaacagccaccaaagcgctgtcataacaaaaccgatattgacgagtgcgacatcactaattggcaagatacctgtcgcttggaaaataataaagataataaaagggatgcaacttcctaaataaccataggcatatccggcagatgacactttatccatccggtcgttcgttgttacatcaattaaaaacgcatcataaaaaatatttgcacctgaaaagcctattaatgacagcacataaaatccaagtaacaatagccaggcatccgtgggtatgaaaattaacaagaaagtaaagccaatcccgatggctgtaaaaataccgaaaaaccgttttttgaaaaattgataatccgcaattgttccaagtatcggtgcaagtaatgaaataagtaacgtcccaatcgagtttgcatatccccagtacgcggtcgacgtagtgtcagcaattccagcattcgctgctacccctttaaaataaattggtaaaatcgctgttgtgatcatgattgagtaggcggaattcgcccaatcttgaaaaatccaacttttctcctcttttgtatatgccaaatgtgtttctccccttttctattcgaatatcgcttctatgacagagccagcagtatttggaaattgcaagtccaaaatgtgtgcaaatgtaggtgcttcgtcaactaagtgagcattgctgattttgtctccttttttaataccaggtccattaaaaataatcgtggttttgtaagctggctttttaggagaataaccgtgaaccgctttatagtaacctggttttccaagcatttcatcagtgactttctcgtaaatcggaccatataaatcatccataaaatagtaaccagccttcccttcaaccataaaagtagcatcaggatcagcaccacgaagtactatttcttcttttggcaaaatttcttctatttcagccatgctttgaagtaaatgctggatttcttggttatgtaaatcattttttgtgtaaatataactggagccgtcacaacttttagcgtagacgttccattccgtaatcttattgtccactacggttatccagccttgttcggcaaaaaggacatttaggcgtatggcgtgtgttacattaatttgataatgatcgcctagaatagcaaagacagtattttcataaattccagcttcttttgcagcttggataatcgcagctaaacgctcatcgtgtcgttttaaggccgcttttgcttcaggggaatctactccgtgcgcatgtcgcatactatccatatcaaccaaatgtgttaaaagtaatcttggttttttcgctttaattgtatcaactacgctagctgtcaaaaatttatctaagtctggttggttgattcccttccgcagatgaccaaatttccggtccatatctattaaaaacaatggtgagctagcatgtaatgacaccatcatttgcgttaaccaaaagcgattcggaaaaatttcggcaatattataatcaattccactttttgctgcaaccggccataaaaatgcagcggtcgtcatccctttctcttttgctaaatcataaagtgttggtacttgaatggcttttttataccaataccaatcaggagaatctttttcaggttgaactttcgtgttattaataatcccatgagttgcgggataatgtcctgtgataatacttgtatgcgctggatatgtcagtgatggataaatggtttcaacttcttggatgtgagttcctgtcttaattaattcccgtaaaacgggcaaatctgtcgtatcttttaaatcaagtgctccaagtgcgtctaatgaaatcacaaaaagatgtttttccattattttctcccccttcaaaaaaacagggatttcccagaaaatctggaagaacccccgtgtgaattacgtatgactgattgtgtcttttggctgttcgatttcttcttgattcgtcacaccgagcacatctaagaagaacatcacaactggaataccaacgattaatccccaaattccgaagaaatgctctccgaaaataagaataatgaaagtataaaaaactggtaaatttgttttcgctgacataagttttggattaaggacataagattctagtgcatggataataataacaacgactaaaatgtagaaaatgtattccacgccgccgatagaataaccaatgatagttaacgggacgagagaaataatcacccctgctaccggaatcaaaccaagcaaaaacaccattatggataaagtcatcaattgcgggaaacctaaaatccaaagtgctatcgtggttaaaattgcattcacaagcgcaatgataaattgtgcttcaataactttaccaaaagtagcaacaaatttggagccaaagaattttacttcctcatagataaaaccaattttactagtagaaaattgattcgtgaatgaaactaaatgttcttttccgagtgagaaaaatagacttaacattagtgcgataaagacgttcatcaatacagttcccacattagttaaataagttaatatcattgaaacaccctgttctgtgtatttcataatatcaaattgattcgctaaactaacaatgtaattaatgaaatcattgttgctatctgtcgttaagaaagtatttccgaatttcaccagttgatttatttgatccgctaagacaggaatgtacttaacaaatacaaagatgataactgcggcgattaaaacataaagtaacaatacaataatttgccgataaatggagattctccgtaaaataaaattctctaaacgtgtaataaggtaagaaaaaatgaatgttaataaaataatattcatttggcttcttaataagtataaaacgaaggcaattaatataaatacgccaactcgtcgaacactgcgattttgtaaaaataaactaagttctttcaaaaatggatgccctcctctatttatcttcgcctatgattttaacttctgtttctaactctacatcaaatttctcgcgtacggtttgttggacgtaagcaattaaattcatgtaatcagtcgcagttgccccaccgatattaacgataaatccagcatgttttaaagaaacttgcgcaccgccaataatatgcccttgcaagccactatcttgaattaatttaccagcaaagtgaccaggtggacgtttgaatacactaccacaagatggatactctaatggttgtttagcttcacgtgccgcagtaagttcatccatttttgcttgaattaggtttttttcttctaatgctaaagaaaaagtggcatctaatacgatgtaatttttctctgcaatagtactaaagcgatatgctgcttttagttcagaacgttttagtttttttaattcgcctgtttgtgtcagtacggttgcagcttctaaaacatcactaatttcgccgccgtatgctcctgcattcatatgtagcgctcccccaatagatccaggaataccacaagcgaattcaagtccgcttaagctttcattcagtgcaaattttgcagtgtcaatgagtttggcgccactcattgcgacaatttgggtgttatttctttcaatggtttgtagtaaatcgagatgtaagataacaccgcgaattcccccgtctttaatgattagattggaaccgttaccaagaatagtaagtggaattttattttggtgacagtatgccaccacttcttgcgcctcttctattgtttttggcataacgaatacgtcagctgcaccgcctgtttttgtataggtatacttagataacggttcatttaatttaatcgctatatgcggaaactttgtttgtaagttattcattatttatttcaaacctttcatggttgtagtttaaaaatcacttcctttattttatcatggaacctctcttttacaaagaattccatagtttttttcttaaattaggaatatttagggatgatttagggtaattggatgatatgttcttgagtaataaaattaaaaatgttatgatatagaacatacattcgattaaaaaggaaagggatgaaaaaatgattcgttttgataatgtatccaaaaaatacagcgatgataaaacagcagcagtaaataatgtaactttggacataaaagacggcgagttctttgttttcataggaccgagtggttgcgggaaaacaacaacgctaaaaatgattaatcgcttgattccactgacaactggaaccatttatattaatgaaaagcgaattagtgattatgatattcatgaacttcgctgggatatcggctatgttttacaacaaattgcgctctttcctcatatgactattgaagaaaatatcgctatcgttccggaattgaaaaaatggagcaaggagaaaattcatgaccggattacggaattattagatagtgttggcttggaccctgaaagttatcgtcatcgcaaaccagctgaattatctggtggtgaacagcaacgggttggtgttgttcgtgcgcttgcagcagatccaggaattattttgatggatgaacccttcagtgcgcttgaccccatttctcgccaacgcttacagcaagatatttccgcacttcaaaagaaaatcaagaaaacgattgtattcgttacccacgatatgcaagaagctttggcgctaggtgacagaatttgcgtaatgcaaggcggcgaaattgtccaagtagcaacaccacaagaaattatgaaaaatccagaaaatgacttcgttaaagactttttagcatccggacatgctttcaatacgccaattttagaagcaaactttacggtgaatgacttaatagaagctgatctgttttattcgtaccaaactagtgatggtacacttggaatttcatcaacggagcctgtcgaaaatcttgttcggcgaatcgcggaagaacaatcaattcctgttacggacgaagcaggtaattatatcggtacagtgtcaaataaacatgtgatgcaattcttagcgcgtcatctggaaagttcaggtgagcttgtatgaatactcttatagatacatttactgtccgtaaagatgaactattcacagctttagtgcaacatattcaaatttcctttgtctctctttttatagcggtgttaattgctttacctcttgggatttatttaactaggcataagcgactcgctgaaccaattattcaagtagccgctatttttcaaacaattccttctctggcactacttggtttgttaattccactcgttggtattgggatagttccagcgattattgcgcttgttatttatgccctcttacctattttgaggaatacatatactgggataaaagaagtcgatcctgcccttgttgaagcctcacgcgcaatgggaatgaacaaatggaaaagattatacaaagtacaacttcctcttgctatgccagtaattatggctggtattcgtacagcgatggtattaatcatcggtacagcgacacttgctgccttaattggtgcaggtggacttggggacttgattttactcgggattgatcgcaacgataatagtttaattcttttaggtgcaattccagcagccttactagctattttgtttgatttcctactacgtttccttgaaaaagcatctttcaaaagcacgattattacaatttcagcaggtatcttgttaactgccgcaattatcgtcgttccttattttgcgtcggataaaaaggaaattacaattgctggtaaattaggagcagaaccagaaattttaattaatatgtacaaattagttattgaggatgaaacggatttaaaagttaacgtgaaaccaaatatggggaaaacaagcttcgtattcaacgccctaaaatcaggcgatattgatatttatcctgaatttacaggcacagtgctagaaaccttcttaaaagaaaatgctaaaacacatgatccagaagaagtgtatacgcaagcccgtgatggtttggctaaagattttgatatgacttacttaaaaccaatgaaatacaataacacatatgcacttgcggtttcgcctgaattcgctaaagaaaacaatttagaaaaaatatctgatcttggtccagtatctgaccaagtaaaagctggattcacactggagtttaaagaccgatcagatggttataaaggcattcaagataaatacggactcacgttctccaatttgaaaacaatggagccaaaactgcgatacaatgcaattaagtctggagatatcaatttactagatgcctattcaacagatagcgaactcgcgcaatataaactaaaagtactggaagatgatcagcagctcttccctccttatcaaggtgcacctttaatgctgacaaaaacattagataaatatccagaactgaaaaagccattaaataaactagctgggaagattacagatgatgaaatgcgcaaaatgaattacgaagtgaatgtaaatggcaaatcagcttatacagttgccaaagactatttgaaagatcaaggtattattaaataaaaaaagcgaagtggcgtaaaaaccacttcgctttttttattgtctaattaagtttttaactttattaatatttggtttatagaaacgacaatgtgtttcaaattctttgttgaattcagcggctctttgggttagtgattgttcgtgatcaagcatcaaaccttcttcgagtaacggtctaagtgaaatgatttgatcgaaaacaagaccggcatttgtatcactaagaacagataccattttcccaagtgctttttgtttgtccgtgggtaattctttttgatgaagatggaaccattttgctaattgtttgcgattttttcgggtcgcttctaaataaatactttgcgcataagctgctttagcaaatgcaattgataaattttcagcagattcccagtcttcttccaaaatttcaccttgcattttgattttttggttgagtagagtaatatcttcttgataaacatccattttgcgttgttgttgtttataaacttccatcgctaaattaagttcatcaatagttggctgcattttttcaccaaaaatagtattatcatttaaaatcaattgtgtttgttctattttttcagcaataatgctatcgcgttctttaattacgtgtgctcgtttacctaagtattcaaaatagaagttgtacttttgaatgcgattaactactgcttctgcttctttcacagttgctggttcttcttgtgaatttagtactgttacaccagccactttgcttaatttagtataaataataattgtaaatacttcaccgtccaaattgattgtgtacggtagtttatgttgctgttctaaaagccttttatgttgttttaatagtttatccgtcatcgttaatcaacacctttactacgccattagtattatataattcaattatatagtataaagatgaaaatttcgagggaaagaaatgagaaaattatttttaattgtttacataatataattattgtcttctttcttactttataatgaggtcaaagtataaaataacaagtagatgtttaagactgcaatgaaaatggcaacagcccaagaaatgatttttaaccatgttgggttgacgaattcgcccatcttttgtttgtcacttgtaaacattactaatgggataaccgcgaatgataattgcatagacagaataacttgactaaaaattagtagttcattgataccgtttgctccgtagagtgctgtgattattacagctggaacgattgctagtacacgcgttaacaaacgacgtaccactggttttaaacggatgtttaagaaaccttccataacgatttggccagccaatgttcctgttaaagtagagttctgccctgatgcaagtaatgctactgcaaaaacggtgctggcgatactgcttccaagcgttggattaagtaatttgtaagcatcctcaataccagcgacgttatgttgaccggtcgtataaaaggcagcagcagctaaaattaaaatcgatgcattaattaataaagcaatcgttaaggaaaaagtggaatcgataaatgaaaaacgaattgcctctttcttcccttcttttgttcgggcatattgtctggtttgcacgatagatgaatgcaaatacaaattatgtggcataactgttgccccaaggataccaagtgcgatataaagcatagctggattagtaacaatttctgattgtggaataaatccctttgcaattgcttgcatatctggatgtgacattaccatttccgccccaaaacatacaagaatcgtaaccattaaagtaataacaataacttctatgtagcggaaacctttatgttgtaaaaataatacgagaaaaatatctaatgctgtaatacaaacgccccagattaacggaataccaaatagtaaattaagcgcaatcgcactaccgatgacttctgcgatatccgttgcaataatcgctaattcagctaaaatccaaaggacgaatccaaatggtttagaaaagtgatcactagaggcttgggctaaatcgcgaccggtgacaatgcctaatttggatgcaagtgattgtagtaaaacggctaaaatattagaaattaaaataactgataataacgtgtagccaaactctgacccaccggcaatagaagttgcccagttccctggatcgacatagccgaccgcaataagtgcacctggccccataaaggcaaataatttacggaaaaatttcgcgtttttaggaatagctacggaattatttacttcacttaagctgggagcattctgtgcttttctccagctttgttttgtacgttctgttttatcttttttcatgctccctgaccttctttcatttatgataaaaagtttactacgggaaacattctttgtcaaacgaaaaacacaacctttatgcataaatgataggttgtgttttcgcatatttttataaggcttcggttagtggttttcttttgtttttaactgggtttagtgtgcgttcgacccaaccaagaagtacatcggctaatatggccattactgcggttggaatagcaccagctaaaataatagcagtaccatttgttgcatttgttccgcgtacaataatatcaccgaggcctcctgctccaacgaatgtcccaattgctgctacaccaatagcgataacaagtgcatttcgaatacccgccataataacagataatgcgagtggcatttcgatgaggcgtagtacttgccattttgtcatccccattgccttaccagattctaaaagcgctccatcaacgtttctaatgcccgtgtaggtgttttttagaattggtaataaagaatataggaacaaggacaagacgactgtattcgtccctaagcccatgataagcataagtacggctaacattgctagtgccggaattgtttggatgatattagcgatttggataacccaaccagctaagcgtttttttcttgcaatatatactccaagcggtatcgctatgattgctgcgaagataactccgtaagcactcattaagaaatgccgccagaactcttccatgacataacttccatttgtttggtaataatcaattaattgttttaatgtgtccatcttttggcacctccttagtttttaccttcaaagtaattatttttttgcaagaattcttgtgctacgatggatggttctttcaacttgccatctgcttcataattaagtttttgcatctcttctgtcgaaattttaccttttaatttattgatagtcgtttttaattccggatgtttctttaaaatttcgtctgttgctaatgcagatgcatcgtatggtgggaagaatttcttatcatcttttaatagttttaaattgtaagttgggatacggccgtctgttgaataaccaagcgccacatccatttgattgtttttaagtgctgtgtagattaagccgatttgcatggggaagattttcttgaattcgatatcataggcttttgaaaatgctttatagccatctccttcgcgttccatccaagaattatccacaccagcagtgagctcattttctacttttcgcatatcacttacggtgtttaaattgtattttttcgcagtgtcttggcgaaccataaacacgtacgtattcgcaaaaccgtaagaatcaaaccaggtttggtggaaacgctcttcaaaacctttcttaacagctgctaaggctttttctggatcttttatagcttcttcgcctagcggaccaactaaatctgtaccggtgtatctagtagcagtaatatctacatccccatttaacatcgcttggtgttgaacgatagttgatccgaggttgttgacgatttctacttttaagccagtatcgtgctcaattaattcttttaaaatattagaaacgatttgagattcagttgttgccattgcaccgatccgaatagtatctttggaactgcctccaagtcctggtaaagagcagctagataagaaaagggaactcgttagtagtaaaacgctgaataacgcgataaattttttcttcatgttattctcccccttcccgagcttcacggatggcttttggtgttaagcgatattctaattttccaagcgcgaattctactacaagggctaaaatggtaaccggaattgccccaccaagaattaagtctggacggtataagtttaaaccattaaaaataaagtctcctagtccaccagctccaatgtaagaagcaagcgtcgcccaagcgataacgtatacagcagataaacgaataccagccataataacggagatggagttaggaatttcgacattaacaattagttgccaattcgtcattcccatgccacgaccagattcaattagatttttatcgactccccgaacaccaataaacgtgtttcgtaaaattggtaaaagcgcgtaaataaatagcgcaataatcgctggtaacgttccaacgccaagaaacggaataataaacgccaaaatagcaagagacggaacggtttgcaaaacactaacaacaccaataacaaagttcgctacttttggtgaacgcgtgagtaaaatcccagttggtaccgcaactgcaatacctaaaataacagcagatagggagataaataaatgttgccatgtttgaacaagcaagttatggccgttttcttgaaaaaatgtaacaattgcgtccatagcttatccctcctgcttcatttctggttctgtcgttttggaatccgcctgttcctcctggttttctgtcgcatcttctaaagtaccccaaatggagtcatatacgatatcaactaagctggcacgagtaacaattccgacaagccgtttatctttatccactacaggaatgtatttatatccacgttttagaatacgttgtacagtgtcacgaagcaaggtatcttcataaacataaaagacatttttctcgataatgtccataacagaagttgctgtacgacgatttaaatcaatttgctctacgtcgataaagccttttaaaacattaccttcatccacaacaagtaacgtatctactcgtttttctttcatgacagtaatcgcagcttggagtgatttatccgctgtaatagagactggatttgtgttcatgatttgtgctacttgtgtaacatcaggtttcgcttcgattaagcgatctttacctatgaaatcttccacaaatgaattcgctggattgcgcaaaatttcatctggggtatcaaattgaacgatttcgccatctttcataattacgatacggtctgccagtttaatcgcttcatccatatcatgggtaacgaaaataatcgtcttaccaagttctttttgcaaatttttgaattcttcttgtagggaatcacgagtaattggatctagcgcgccaaaaggttcatccatcagaatcaagttttgctctgccgcaagagctctcagaacacctatacgttgctgctgtccaccacttaattcgtaagggtagcggtccaaaaattcctcaggtaaatcaactaatttaattaattcttttgctctttcttgttttttctcttcggaccatttaagtaattttggtacaaggacgatattttcgcgaatcgtcatatgtggcatcaagccaatttgttgaataacataaccaattgagcgtcttagtttgacgggatcttccgccatgatgtctttatcattaataaatatttttccttctgtaggttcaataagccggttaatcatcttcattgttgtcgttttcccacaaccacttggaccgataaaacaaacaaattctcctttatcgatgttaagtgttagatcattaaccgcttttttgccccctttataagtcttcgttacgtgttcgaattttaacacgcctacacacctccattttttctttaccactaccaaaaaattggcaatcgataactaatttccctaactagtatagatttaaactttttaaatacaaaaaaacagcttaaagacagtgttacattcaaacggaagttactaaacaagatgatttcgtacttgtggcacgtgtgacatcgatgctaaacttgtaatcgtgaaaatgagcattgtaataagctgcaatatagtatttatttaattataacacacttaaaaaggcccaaaagcaaatgcttctgggccttttggttattttggtaagaataattttggtgaggtcttcaataatatcgaaataatgatacctgaaacaaggacggtaccaaggcaactggccccattcatcacgatagaaaatagttgtgccccccaaccttgaaatgcataagccccccagaataatactcctgcaacatagtgccaaaaatatcgagctaatcctccaataatcatggttccccacgcccattcgattgcctttttgagttgattagcagctaaattacttcgaacttgcttgctgaagacaccactgaaagcaataaaactgaatgccaaaatatactcaataattgcttgggatggcattaaaatataagccttacctgttaagaaatgcagtaagccccataatagtccagcgaatccagccgcccaaaaacctcgacggattgcgatgacatacattggaatcatgccaagcgaaatggaaaaactggaaccaatgtctagcggtatgaaacttaataccatcgccactgcagcaaagatagcacactcaagtaaaatgattaatcgtttgttttgcataaaaaaataaactcccctcttctttttggtcaaaaacgtaccccagaagaaagcagtttctatggttagaaatgcaatcgccacaatccctacgctcgtattaacgaacaggttcaaagggtcagaatccaaaaacacgtggactcaatctcagctaagaagccccccctgtggtaacgtctatgaaattatcgtacaacaattattatagcatgcacttcttttttgtaaagaattttttcttttctttagtcatttgcagaaaatttcacagtgttttgtgcttttttcggcaatttatcaaaaataagctgataactattttgaattaacgcaaattcagtttcagcttccacatcgtatttttcattaataacgagcgtaatccaatgctttttatttaaatgatagcctggttttatgctcaaatattcatcgcgcaacaaatcaattctttccggctgacatttaacgcttatgtataaatccccgtggtatagatgtatcagtgcaaatattttaccgccaaccgttaaggcgtgcgtttttttatcaaatgggaaagtttctttagcggcttgtaaagtaagacaaagcgcgactttttcttgtaaagtttgctcgtaatccatccggctctcctccttattttgatattataacatttatttatgcgtgtatgctttctttgctacactaaccatgttaaaatagaagtaattgtgctttttctgatttcaaggagaagtaacttagtattggaggaagaaaatgttaactgtaaataatgttggcttacgctacggcgataaaaagctatttgaagatgtttcgattaaatttttaccaggtaactgttatggtcttattggcgcaaatggtgctggtaaatcaacgttcctaaaagtgctttctggcgagcttgattcacaaagtggtaatgtgcatattggttcaggtgagcgtctagctgtccttcgccaagatcatttccagtatgatgatgaacttgtcctcaacacagtaattatgggacatgaacgtctatataaaattatggacgaaaaaaatgccatttacatgaaagaagatttcagtgatgaagatggtatccgtgctgcagaactggaaggcgaatttgctgaattagatggttgggaagcggaatctgacgctgctgttttattaaacggcttaggtatccctactgacttacacggaaaactaatgaaagatttaactggtggagaaaaagtgaaagtgcttcttgcacaagctttattcggtaaaccagatatcctacttctggatgagcctactaaccaccttgacatccgtgcgattcattggttagaagaatttttaattaactttgataatactgttatcgttgtatcccatgaccgtcacttcttaaataaagtatgtacgcacattgcggatcttgatttcagcaaaattaaattatatgtcggaaactatgatttctggtatgaatcaagccaattagctcaaacaatgatgggcgatcgtaataagaaaaaagaagaaaaaatgaaagaattacaagactttattgctcgtttcagtgcgaatgcatcgaaatccaaacaagcaacaagccgtaaaaaaatgctcgaaaaaatcacgctggaagatattcaaccttctagtcgtcgttaccctttcattcagttcaaaccggatcgtgaagttggaaatgacttattgacagtgacaaatttgtctaaaacaattgatggcgtgaagattcttgataatctttctttctcgattaatcgtaacgacaaagttgcattagttggcgacgatgaagttgctaaaacggttcttttccaaatccttgcgggcgaaatggaacctgatgaaggtagctataaatggggtattacaacaagtcaaagctatttccctaaagataactcagagttctttgaggaaaacgacatgagtcttgtagaatggttacgtcaattctctccagaagatgatagtgaagcattcttacgcggattccttggtcgtatgctatttagtggcgatgaagtacttaaaaaagtacgcgtcttatctggtggagaaaaagttcgttgtatgttatccaaaatgatgctttcaggttctaacgttcttttactagatgaacctactaaccacttggacttagaatccatcacagcattaaataacggcttggaagcatttaaaggtgcaataatctttgcttctcacgatcatcagttattacaaacaattgcaactcgcatcattaacttatcaaaagaccaattttacaataaagaaatttcttatgatgagtatctaaaagaagtaatgaacgtagcagaataatgacaaaaaaacaatatcccatctgcgggatattgtttttattttagttcaattttaccagtttctgtcgtgattggtgtggatgaatctttcagatagcttagaaaactataagaaatccatgtaatatcagaaactttgtctaaatcatctacgggaaaaatgatttttcctttggcagtttcgccaggcttaatttcagttgtatcaaaattagataaaacagcatctcctccatttaaatctaacttgtttgcctctagttgtccttggtttggataggtttcgagtgttttagctgcattgttggtaatttctaaagcgatagtaatactaccatctactggcttacttgcggatgttgaataagtttctttcttttcgaccgtcacagtagtgatttttttcttaatattatctgcggaatcttcatagttaactttatacgtcttcgtctcttcaggggttgcttgacttgttcctttagaagaataattgaacacatcattttgtacttgctgataatgtgaaaaactaacaatgataccaataatggagccaaccattaataacatccctgcactagttaaaatagcaccaatcttccgtctggctgggaaaaataaaattacgatacctgcgataaaaattaagaaagcacatattccggcaatgatccaaatttccatcttatttgctccttttatgcgaatttctccctcactataacatatttagcctctagttcaaagcagttaagtcacttgctggagatgggtaggcaaaaataacagattgtaaatcagctaaagttagatttgctttcattaagatggcaatgtaatttatcatataatctgcttcttcactaagaaaatgagcgcctttgatttgccctgactctctatcttcaatgatttttgcaagcgcaatttgttcatttgttcgtttgtatgtgtaccaactagttgtgtcatgatttttaatttggtatttttccggatttgctttagcttcttctgtacttataccaatgcttgcaagttttgggctagtgaaaacgacgcttggtatcgctggataagttattttttcgtttacgcctataacatttttagccacaagtgctgcttccaagcttacaactggtgttagtggtgcaccttttgtcgcagcgacatcaccgcatgcataaatatgagggttgttaggtgtttgaagtttttcgttaacgacaatgccttttttagtgtaatcgatgcttgcattttctaaagatagatgtgcgatgtttggcattctaccagttgctccaataattaaatctgtttgtaatgaaaagctatctttacctttaatatgcaatttcccaccatcattttcaattttagtaatatctgtgtcaaaatggaaatgaatgccttcatcttttatattggcaactaatgccgctacgaaatcaggatcaaatttctttaaaggttcactattatggtgaataatgtgtacatctctcccagctgcgagtgctatagaagcaaattcaaatgaaatataacctccaccaataaaaacgacagaatctgggagtttttcaagtgataagaaatcatcgctagtttgaatgtattctttcccttctacttttaacgtgcttggtgttgctcctgttgcgatgacaattttttcagcataaattaaatcatcgccgacttgcaaggaatgggaatcttggaagctagctgccccaaaaaatgtctcaatcccagcttcttgaaagcttgccaaacgactttctggcacattctcgacaaaagtttctttaaatgccattaaatctgtccagctaatcgtcgctgcttgcttaatgcctttgccgcgtagtctggtggacagatttcttgcttctcttgctccgatgagaacttttttagggtcgcatcctctgagtacacacgttccaccccaattccgctcttctacaattgctacttttaaccctgctgcctgtgcttcaaatgcaaccgttgtaccacttgcaccgcttccgattataacgacatcatatgtaaattttgccacctaaatcactccttcttagcttgttttcccgtctgatttcactttcaaacgaaaaaaactgccacacacgaatgtgcagcagttcattctagacttccataataattggtaaaatcattggacgtcgttttgtttgttcaaataagtagcgatttaattggtcgcgaatgtcttgttttaatttcgcccattcaaagccggtttcttgaagatttttttcaacaatttttgtgacaactttggaagattcttcaatcaaatgttctgattcgcgcacgtagataaagccgcgtgaaatgatttctggtcctgaagtaatggtttttgatttacgattaagtgttactacaacgatgaaaattccgtcttctgagagtaatttacggtcgcgtagcacgatgtttcctacatcaccaacacctaatccatcaattaaagtattaccagaataaacgcgatttccggccgtcattttatcatttttatattctaaaatttcgcctttaccaacgataaatacttctgattttgccatgccaacttcatgagctaatttagcatggctgattaacatgcgatattctccgtgaactggaacaaaatatcttggttttaataagttaatcattaattttaaatcttcttggcttgcatgaccagagatgaagagattgttactcatagttagcactttcgcacctgctttatagagcatatccattgttttcgccatcattgtttcaagagatggtgatggcgtagtcgtaatgtaaacagtatcgccaggtttgatgttaagttgcggatggtttcctttagtcattaattgtaatgattgaattggttctcctagattacctgtttcaataattgtaatttcatcatcgctatattttttaagttcttttaacggaacaattaagtcttcttcaatgacgattttacctaaactgccagcaatttcgaaaacacgctctagttctttaccaacaatagcgactttacgtttggttgcaacggatgcatcgagtacttgttgtaagcgaattaaattagaagctacacaagcaacgataattctaccatctgccattcggaaagcatgtctaatctcttcttcaattaaactatcgctagacgttgttccagggtgctcagcctctgaactatccgaaagcaaggctagtacacccttttcgccaaattctgcaatatggcttaaatcagaagcgtagccgtctttcgctgattgatcgaatttgaaatcccctgtataaacaatggatccttcgcttgtttcaaggacaatacccacagaatcaggaatagtatgtgttgtccggaaaaaggaaacatcaatttttgaaaaggacaatgttgtttcttcgttaacgacatggaaattcttgaagcgtagtttgcggtgctctttaagcgctgattttgctagagcaatcgttaattctgtcccgtaaacaggcgctttgattttttgaagtaagtatggcaatgcaccaatggcatcttcgtgaccgtgtgttagaaaaatagcttttacacgatctttattttcttctaaatatttgaaatcaggaatgacaatatcaattcctagtaattcattttcggggaacattaagcccgcatctaatataaagatatcttcgtctatttctactacatataaatttttgccactttcatcgacaccgccgagtggaatgatttttatgtttttcgctttttttattgtcaaagcgtagacctcctttgaactatttagaaagtccttctaatatagcttgtaatttcgttccttgttcagcattcaaatctacaagtggtagtcttacaggtccaacgctaataccttgttgattcagtaagtattttgttggtgctgggttcggtactgagaataatccattcatgaggggtaataactctcggtgaatttgagcagctttttgaacttcaccacgttcaaatgcttgaatcatttcttgcatttcattccctacaatatggctggcaacagaaataacaccgtttccgccaactgcaagaattggtaatgttaaactgtcgtccccactgtacacctggaaatcgtccgaagtttcagcgatgattttgcttatattatccaaattaccgctagattcttttacaccaacaatattaggcaatttcgctagacgaataattgtttctggctcgatattaacaacactacggccaggaatattataaataactactggcaaatcagaagcttcagcaaccgcggcaaaatgggcatacaagccatcttgatttggtttattgtaatatggagctacgattaaaacagcatccataccaccaagcgtggcaacttcttttgtaaaagcgattgtttcagctgtattattggagcctgttccagcaattaatttcgcacgtccgtcattagtttcaattacttggcgaaataattttattttttcatcatgggataaagttggagattcgccagttgttccagcgattactaaaccgtctgagccatttttgattaagtgattcacgagatgatgaattctttttttgcatactttatctttctctgggtgaattggtgtcaccattgctgtaattactttccctaaatccatctttcatttcctccttacttaatttccaaacaaaatacgtcatgaagggcattgactgctgaaattaagtccttttctcttactaatacccaaatagtagtatgactatccgctgattgtaaaattgggatatttttttcagataatgcgccaacgatttttgcagtaacaccgggaacacctgtgattccggcgccaacaatagaaactttcgcacaagcttgtcgtacagttgtttgtaagtctgcatcttctaatagttgttttactacatgagatttttcttcgggtaccgtaaaaatgacagagttagtagagatgttaatgaaatcaaggctgattcctgcatctgctaatattttaaaagcgagttgttgtgcttttacagtatccgcttgtactgatatttgtgttaaattggttacatgagctacgccggttaccattcgttctttcacgtcaaaatgacctgaatcatcagctagtgaagtgacaagtgttccggtgctttccaaataggtagaacgaatccgcattggtatttttgcagtcatcgcaatctcaactgcacgtggatggataacttttgcaccttgatatgccatattgctcacttcgttataacttactcgtggtagtgaacgcgcgtgttctacgatacgtggatcggctgtcatcattccatctacatccgtaaagatatcaatatagtttgcttgtaacgaaactcctagagctgctgcggatgtatcacttcctccgcgtcctaatgtggaaatatccccatttgcagtaataccttggaagccagcaactactgctacatcaaggttcgttaatgcgtctttcaaacgagctgtatccacttctgtgatttttgcatttaaatggtcgtctgatgtaatgatgcctgcttgaccaccagaaaacgcctctgctttaatatttgcttcttttaacatatttgtaaatacagatgctgaaatagtttcgccgacagagagtaaagtatcttgttctctagctgttagctttgtatttttagcaccaataagttctaatagtgtgtcggtcgcataaggatctccgtatctaccaatggctgaaacgacaacaacaactttatatccttcttttagtacttgtttgatatgattgaatgccatcaaacgtgatttttcattttgtacggatgttccgccaaatttttggacaataattttcattacttacacctctaaataatcgctaatttaactaaactttcagctatttgaatcgaattccatgcggcaccttttagtaaattatcagaaacaatccacatatgaaaacctttagggtcgtctatgtcagcacgaatacgaccaacgaagacttccttcttacctgcagcttgaacagcttgtgggtaaacttgatttgctgggtcatcttctaggacaataccaggtgcattttttagtgcattttggatttctttagcagttatgccttctttatccacttcgatataaacactttcagagtgtccgctaactactgggatacgaacgcacgtagcagaaacttttattgtgttgtcttccatgattttttttgtttcattgatcattttcatttcttcgtatgtatagtcattctctgtgaaaacgtcaatttgtggcaatgcattaaaagcgattggataatgttttttgtcccctttaacgggcatgatttgtggagtgaattctttgttatccagaacagctttgctaccgtcttttaattcttgaattgcgcttacaccagagccagaaacagcttgataagtggaaacaataatacgatttaagccgaatgcttctcgaatcggttcgagggctgctaccatctgaatagtggaacagttaggattagcaataataccattatgagagaaaagtgctttttcattcacttcaggaacgactaatggaactgttggatccatacgatatgcactcgtgttatcaataacgatagctccacgtttaactgcttctttcgcaagtgctttcgatacagaaccaccagcgctaaataaagcgatatcaacgccttcaaaactttcaggtgtggcttcttgaatagttacttcttcaccgcggaaggatagtttttttccagcagaacgaatagaagacaagaatgaaacttgctttatcttaaaagtcgccgcctcttctagtaattcaatcatttgggtaccaactgcaccagttgcacctacaactgcgacatgatagctttttgtcatagtttacaattcctccttcaatttaatcctcgtattcctgcctaaaaacagaaatctggttaattttacacttactttatcataccataaacaaagccatttcgcagttttttatacgcattagcaactatttttttaaattgtttgttagtttgaaataaaaaaaccactttcaaataaatgaaagtggtttttgattaattttcggtttgttctgattgtgctttcgcagctgcttctttgttgttaattggttgctctacttttgaagtatcttttttcgattcagatcgttcttttttaagttcgaagtatttgtcgaatacttctttggagattttcatatttgttttttggtccgtaccatatggacgataaatccaaggaacaacaacggaaatagctatttctggtttttccactggcgcataaccgacgaatgtcgtattccaaacactggccattttgttaccttcttttggtccatcatagaacgcatccgcggtgcctgtcttaccagcgacatcgtaatcacttgaagtgaaaacagttcttgcggtacctgttgaaccatgtgttacttcatagaagccttgttgtactgttttgatatcactttcagaaacaccgattttatttaatacttttggttcattagctgttgcaagtgttccaacagagtcaccattagtacttggatttctaatttcttttaccatactaggagcgattcttgaacccccattggcaatagtagaaacatattgagccatttgtagtggcgtgtaggagtcatattgtccgatagcgaaatcgagaattttaccgattgtttggtcgtcccctttataaccagtttgttcacctgggaggtcgatgccagtttttacacctagaccgaattggttgtagtagtaacgcatatcgtcaaaggtgctaagtggtgctctaagaggtccgtttggtacatagtttgcgccacccattttcattgcaacttggtacatataggagttagaagaaatttctaaagctcctacaggatcaagtggtctattaccagctccggttctgttaaaccatgagctctttggttttgttccttttagtacaattggttggtcagtgaaaacagttttgtttgtaatagcaccgtccataataccaccaaggatagtagaaccttttacagcagagcccattgcgtaggcagttgtaaatgtaccaagggaataatcttcaaactcgcccttgtcatttagtttctgtcctgctaatgcaaggacttctccagaatatggatccatggcaacaacgaatgcgcggtcaaataaatctgaaccagcatattgtttaccttgtttgatgtttttttggagaatttcttctactgctttttgaaattcaacatcaacagaaagaactaaatctttccctttggagccttcgtatttgttgacagtttcaataatattacctttagaatcaagtacgctttctgactgagattttgacccagcgagcacactttcatattgagcttctagatagcttttaccaacgcgatcattacgactatatccttgagataagtagtattctgctttgtcttttggtagaccttctttagctgtagaaacagaacctaaaatcgagcgtaaagtttcatcatacgtgtaatagcgattccagtctgtagtggtgtctacaccaggtaaactgtccatgttttcactgacacgtgcaatttcttcgtctgtcacatctttatttttca

(The sequence listing continues in the following parts.)

1. A nucleotide sequence of Listeria monocytogenes, characterized in that it corresponds to SEQ ID NO. 1.

2. A nucleotide sequence of Listeria monocytogenes, characterized in that it is chosen from:
a) a nucleotide sequence comprising at least 80% identity with SEQ ID NO. 1;
b) a nucleotide sequence which hybridizes, under high stringency conditions, with SEQ ID NO. 1;
c) a nucleotide sequence complementary to SEQ ED NO. 1 or complementary to a nucleotide sequence as defined in a) or b), or a nucleotide sequence of the corresponding RNA;
d) a nucleotide sequence of a representative fragment of SEQ ID NO. 1, or of a representative fragment of a nucleotide sequence as defined in a), b) or c);
e) a nucleotide sequence comprising a sequence as defined in a), b), c) or d); and
f) a modified nucleotide sequence of a nucleotide sequence as defined in a), b), c), d) or e).

3. The nucleotide sequence as claimed in claim 2, characterized in that it is a sequence derived from SEQ ID NO. 1, and in that it encodes a polypeptide chosen from the polypeptides of sequence SEQ ID NO. 1 to SEQ ID NO. 2854.

4. A nucleotide sequence, characterized in that it comprises a nucleotide sequence chosen from:
a) a nucleotide sequence as claimed in claim 3;
b) a nucleotide sequence comprising at least 80% identity with a nucleotide sequence as claimed in claim 3;
c) a nucleotide sequence which hybridizes, under high stringency conditions, with a nucleotide sequence as claimed in claim 3;
d) a complementary nucleotide sequence or an RNA sequence corresponding to a sequence as defined in a), b) or c);
e) a nucleotide sequence of a representative fragment of a sequence as defined in a), b), c) or d); and
f) a modified nucleotide sequence of a sequence as defined in a) b), c), d) or e).

5. A polypeptide encoded by a nucleotide sequence as claimed in one of claims 2 to 4.

6. The polypeptide as claimed in claim 5, characterized in that it is chosen from the sequences SEQ ID NO. 2 to SEQ ID NO. 2854.

7. A polypeptide characterized in that it comprises a polypeptide chosen from:
a) a polypeptide as claimed in either of claims 5 and 6;
b) a polypeptide which exhibits at least 80% identity with a polypeptide as claimed in either of claims 5 and 6;
c) a fragment of at least 5 amino acids of a polypeptide as claimed in either of claims 5 and 6, or as defined in b);
d) a biologically active fragment of a polypeptide as claimed in either of claims 5 and 6, or as defined in b) or c); and
e) a modified polypeptide of a polypeptide as claimed in either of claims 5 and 6, or as defined in b), c) or d).

8. A nucleotide sequence encoding a polypeptide as claimed in claim 7.

9. The nucleotide sequence as claimed in one of claims 2 to 4 and 8, characterized in that it encodes a polypeptide of Listeria monocytogenes, or a fragment thereof, involved in amino acid biosynthesis.

10. The nucleotide sequence as claimed in one of claims 2 to 4 and 8, characterized in that it encodes a polypeptide of Listeria monocytogenes, or a fragment thereof, involved in the biosynthesis of cofactors, prosthetic groups and transporters.

11. The nucleotide sequence obtained in one of claims 2 to 4 and 8, characterized in that it encodes a cell envelope polypeptide or a polypeptide located at the surface of Listeria monocytogenes, or a fragment thereof, said polypeptide preferably being SEQ ID NO. 2 to SEQ ID NO. 41.

12. The nucleotide sequence as claimed in one of claims 2 to 4 and 8, characterized in that it encodes a polypeptide of Listeria monocytogenes, or a fragment thereof, involved in the cellular machinery.

13. The nucleotide sequence as claimed in one of claims 2 to 4 and 8, characterized in that it encodes a polypeptide of Listeria monocytogenes, or a fragment thereof, involved in central intermediate metabolism.

14. The nucleotide sequence as claimed in one of claims 2 to 4 and 8, characterized in that it encodes a polypeptide of Listeria monocytogenes, or a fragment thereof, involved in energetic metabolism.

15. The nucleotide sequence as claimed in one of claims 2 to 4 and 8, characterized in that it encodes a polypeptide of Listeria monocytogenes, or a fragment thereof, involved in the metabolism of fatty acids and phospholipids.

16. The nucleotide sequence as claimed in one of claims 2 to 4 and 8, characterized in that it encodes a polypeptide of Listeria monocytogenes, or a fragment thereof, involved in the metabolism of nucleotides, purines, pyrimidines or nucleosides.

17. The nucleotide sequence as claimed in one of claims 2 to 4 and 8, characterized in that it encodes a polypeptide of Listeria monocytogenes, or a fragment thereof, involved in regulatory functions.

18. The nucleotide sequence as claimed in one of claims 2 to 4 and 8, characterized in that it encodes a polypeptide of Listeria monocytogenes, or a fragment thereof, involved in the replication process.

19. The nucleotide sequence as claimed in one of claims 2 to 4 and 8, characterized in that it encodes a polypeptide of Listeria monocytogenes, or a fragment thereof, involved in the transcription process.

20. The nucleotide sequence as claimed in one of claims 2 to 4 and 8, characterized in that it encodes a polypeptide of Listeria monocytogenes, or a fragment thereof, involved in the translation process.

21. The nucleotide sequence as claimed in one of claims 2 to 4 and 8, characterized in that it encodes a polypeptide of Listeria monocytogenes, or a fragment thereof, involved in the process of transport and binding of proteins.

22. The nucleotide sequence as claimed in one of claims 2 to 4 and 8, characterized in that it encodes a polypeptide of Listeria monocytogenes, or a fragment thereof, involved in adaptation to atypical conditions.

23. The nucleotide sequence as claimed in one of claims 2 to 4 and 8, characterized in that it encodes a polypeptide of Listeria monocytogenes, or a fragment thereof, involved in sensitivity to medicinal products and analogs.

24. A nucleotide sequence characterized in that it encodes a polypeptide of Listeria monocytogenes involved in vitamin B12 biosynthesis, said polypeptide preferably being SEQ ID NO. 42 to SEQ ID NO. 64.

25. The nucleotide sequence as claimed in one of claims 2 to 4 and 8, characterized in that it encodes a polypeptide of Listeria monocytogenes, or a fragment thereof, involved in functions relating to transposons.

26. The nucleotide sequence as claimed in one of claims 2 to 4 and 8, characterized in that it encodes a polypeptide specific for Listeria monocytogenes, or a fragment thereof.

27. The polypeptide as claimed in one of claims 5 to 7,l characterized in that it is a polypeptide of Listeria monocytogenes, or a fragment thereof, involved in amino acid biosynthesis.

28. The polypeptide as claimed in one of claims 5 to 7, characterized in that it is a polypeptide of Listeria monocytogenes, or a fragment thereof, involved in the biosynthesis of cofactors, prosthetic groups and transporters.

29. The polypeptide as claimed in one of claims 5 to 7, characterized in that it is a cell envelope polypeptide or a polypeptide located at the surface of Listeria monocytogenes, or a fragment thereof, said polypeptide preferably being SEQ ID NO. 2 to SEQ ID NO. 41.

30. The polypeptide as claimed in one of claims 5 to 7, characterized in that it is a polypeptide of Listeria monocytogenes, or a fragment thereof, involved in the cellular machinery.

31. The polypeptide as claimed in one of claims 5 to 7, characterized in that it is a polypeptide of Listeria monocytogenes, or a fragment thereof, involved in central intermediate metabolism.

32. The polypeptide as claimed in one of claims 5 to 7, characterized in that it is a polypeptide of Listeria monocytogenes, or a fragment thereof, involved in energetic metabolism.

33. The polypeptide as claimed in one of claims 5 to 7, characterized in that it is a polypeptide of Listeria monocytogenes, or a fragment thereof, involved in the metabolism of fatty acids and phospholipids.

34. The polypeptide as claimed in one of claims 5 to 7, characterized in that it is a polypeptide of Listeria monocytogenes, or a fragment thereof, involved in the metabolism of nucleotides, purines, pyrimidines or nucleosides.

35. The polypeptide as claimed in one of claims 5 to 7, characterized in that it is a polypeptide of Listeria monocytogenes, or a fragment thereof, involved in regulatory functions.

36. The polypeptide as claimed in one of claims 5 to 7, characterized in that it is a polypeptide of Listeria monocytogenes, or a fragment thereof, involved in the replication process.

37. The polypeptide as claimed in one of claims 5 to 7, characterized in that it is a polypeptide of Listeria monocytogenes, or a fragment thereof, involved in the transcription process.

38. The polypeptide as claimed in one of claims 5 to 7, characterized in that it is a polypeptide of Listeria monocytogenes, or a fragment thereof, involved in the translation process.

39. The polypeptide as claimed in one of claims 5 to 7, characterized in that it is a polypeptide of Listeria monocytogenes, or a fragment thereof, involved in the process of transport and binding of proteins.

40. The polypeptide as claimed in one of claims 5 to 7, characterized in that it is a polypeptide of Listeria monocytogenes, or a fragment thereof, involved in adaptation to atypical conditions.

41. The polypeptide as claimed in one of claims 5 to 7, characterized in that it is a polypeptide of Listeria monocytogenes, or a fragment thereof, involved in sensitivity to medicinal products and analogs.

42. The polypeptide as claimed in one of claims 5 to 7, characterized in that it is a polypeptide of Listeria monocytogenes, involved in vitamin B12 biosynthesis, said polypeptide preferably being SEQ ID NO. 42 to SEQ ID NO. 64.

43. The polypeptide as claimed in one of claims 5 to 7, characterized in that it is a polypeptide of Listeria monocytogenes, or a fragment thereof, involved in functions relating to transposons.

44. The polypeptide as claimed in one of claims 5 to 7, characterized in that it is a polypeptide specific for Listeria monocytogenes, or a fragment thereof.

45. The nucleotide sequence as claimed in one of claims 1 to 4 and 8 to 26, and/or the polypeptide sequence as claimed in one of claims 5 to 7 and 27 to 44, characterized in that the said sequence(s) is (are) recorded on a recording medium, the form and nature of which facilitate the reading, analysis and/or exploitation of said sequence(s).

46. The nucleotide sequence or the polypeptide sequence as claimed in claim 45, characterized in that the recording medium is a CD-ROM, a computer disk or a computer server.

47. A recording medium characterized in that a nucleotide or polypeptide sequence as claimed in claim 45 or 46 is recorded thereon.

48. The use of a medium as claimed in claim 47, for choosing nucleotide primers or probes for determining genes in strains close to Listeria monocytogenes.

49. The use of a medium as claimed in claim 47, for studying the genetic polymorphism of strains close to Listeria monocytogenes.

50. The use of a medium as claimed in claim 47, for studying other genomes, in particular for the automatic annotation of genes originating from other genomes.

51. A nucleotide sequence which can be used as a primer or as a probe, characterized in that said sequence is chosen from the nucleotide sequences as claimed in one of claims 2 to 4 and 8 to 26.

52. The nucleotide sequence as claimed in claim 51, characterized in that it is labeled with a radioactive compound or with a nonradioactive compound.

53. The nucleotide sequence as claimed in either of claims 51 and 52, characterized in that it is covalently or noncovalently immobilized on a support.

54. The nucleotide sequence as claimed in claim 53, characterized in that it is immobilized on a support such as a high density filter or a DNA chip.

55. The nucleotide sequence as claimed in one of claims 52 to 55, for detecting and/or amplifying nucleic acid sequences.

56. A DNA chip or filter, characterized in that it contains at least one nucleotide sequence as claimed in claim 55.

57. The DNA chip or filter as claimed in claim 56, characterized in that it also contains at least one nucleotide sequence of a microorganism other than Listeria monocytogenes, immobilized on the support of said chip.

58. The DNA chip or filter as claimed in claim 57, characterized in that the other microorganism is chosen from a microorganism associated with Listeria monocytogenes, a bacterium of the genus Listeria and a variant of Listeria monocytogenes.

59. A kit or pack for detecting and/or identifying bacteria belonging to the species belonging to the species Listeria monocytogenes, or to an associated microorganism, characterized in that it comprises a DNA chip or a filter as claimed in claim 56.

60. A kit or pack for detecting an/or identifying a microorganism, characterized in that it comprises a DNA chip or a filter as claimed in either of claims 57 and 58.

61. A kit or pack for detecting and/or quantifying the expression of at least one gene of Listeria monocytogenes, characterized in that it comprises a DNA chip or a filter as claimed in one of claims 56 to 58.

62. A cloning and/or expression vector, characterized in that it contains a nucleotide sequence as claimed in one of claims 2 to 4 and 8 to 26.

63. The cloning and/or expression vector as claimed in claim 62, characterized in that it contains a nucleotide sequence as claimed in claim 11.

64. The cloning and/or expression vector as claimed in claim 62, characterized in that it contains a nucleotide sequence as claimed in claim 14.

65. The cloning and/or expression vector as claimed in claim 62, characterized in that it contains a nucleotide sequence as claimed in claim 9, 19 or 20.

66. The cloning and/or expression vector as claimed in claim 62, characterized in that it contains a nucleotide sequence as claimed in claim 12, in particular encoding a protein involved in secretion mechanisms.

67. The cloning and/or expression vector as claimed in claim 62, characterized in that it contains a nucleotide sequence as claimed in claim 24.

68. The cloning and/or expression vector as claimed in claim 62, characterized in that it contains a nucleotide sequence encoding a protein involved in resistance and/or adaptation to stress.

69. A host cell, characterized in that it is transformed with a vector as claimed in one of claims 62 to 68.

70. The host cell as claimed in claim 69, characterized in that it is a bacterium belonging to the Listeria genus.

71. The host cell as claimed in claim 70, characterized in that it is a bacterium belonging to the species Listeria monocytogenes.

72. A plant or animal, except a human, comprising a transformed cell as claimed in one of claims 69 to 71.

73. A method for preparing a polypeptide, characterized in that a cell transformed with a vector as claimed in claim 62 is cultured under conditions which allow expression of said polypeptide, and in that said recombinant polypeptide is recovered.

74. A recombinant polypeptide which can be obtained using a method as claimed in claim 73.

75. A method for preparing a synthetic polypeptide as claimed in one of claims 5 to 7 and 27 to 44, characterized in that chemical synthesis of said polypeptide is performed.

76. A hybrid polypeptide, characterized in that it comprises at least the sequence of a polypeptide as claimed in one of claims 5 to 27, 27 to 44 and 74, and a sequence of a polypeptide capable of inducing an immune response in humans or animals.

77. A nucleotide sequence encoding a hybrid polypeptide as claimed in claim 76.

78. A vector, characterized in that it contains a nucleotide sequence as claimed in claim 77.

79. A monoclonal or polyclonal antibody, a fragment thereof or a chimeric antibody, characterized in that it is capable of specifically recognizing a polypeptide as claimed in one of claims 5 to 7, 27 to 44, 74 or 76.

80. The antibody as claimed in claim 79, characterized in that it is a labeled antibody.

81. A method for detecting and/or identifying bacteria belonging to the species Listeria monocytogenes, or to an associated microorganism, in a biological sample, characterized in that it comprises the following steps:
a) bringing the biological sample into contact with an antibody as claimed in either of claims 79 and 80;
b) demonstrating the antigen-antibody complex possibly formed.

82. A method for detecting the expression of a gene of Listeria monocytogenes , characterized in that a strain of Listeria monocytogenes is brought into contact with an antibody as claimed in claim 79 or 80, and in that the antigen/antibody complex possibly formed is detected.

83. A kit or pack for carrying out a method as claimed in claim 81 or 82, characterized in that it comprises the following elements:
a) a polyclonal or monoclonal antibody as claimed in either of claims 79 and 80;
b) optionally, the reagents for constituting the medium suitable for the immunoreaction;
c) optionally, the reagents for demonstrating the antigen-antibody complexes produced by the immunoreaction.

84. The polypeptide as claimed in one of claims 5 to 7, 27 to 44, 74 and 76, or the antibody as claimed in either of claims 79 and 80, characterized in that it is immobilized on a support, in particular a protein chip.

85. A protein chip, characterized in that it contains at least one polypeptide as claimed in one of claims 5 to 7, 27 to 44, 74 and 76, or at least one antibody as claimed in either of claims 79 and 80, immobilized on the support of said chip.

86. The protein chip as claimed in claim 85, characterized in that it also contains at least one polypeptide of a microorganism other than Listeria monocytogenes, or at least one antibody directed against a compound of a microorganism other than Listeria monocytogenes, immobilized on the support of said chip.

87. A kit or pack for detecting and/or identifying bacteria belonging to the species Listeria monocytogenes, or to an associated microorganism, characterized in that it comprises a protein chip as claimed in either of claims 85 and 86.

88. A kit or pack for detecting and/or identifying a microorganism, characterized in that in that it comprises a protein chip as claimed in claim 86.

89. A method for detecting and/or identifying bacteria belonging to the species Listeria monocytogenes, or to an associated microorganism, in a biological sample, characterized in that it uses a nucleotide sequence as claimed in one of claims 1 to 4, 8 to 26, 51 to 55 and 77.

90. The method as claimed in claim 89, characterized in that it comprises the following steps:
a) optionally isolating the DNA from the biological sample to be analyzed, or obtaining a cDNA from the RNA of the biological sample;
b) specifically amplifying the DNA of bacteria belonging to the species Listeria monocytogenes, or to an associated microorganism, using at least one primer as claimed in one of claims 51 to 55;
c) demonstrating the amplification products.

91. The method as claimed in claim 89, characterized in that it comprises the following steps:
a) bringing a nucleotide probe as claimed in one of claims 51 to 55 into contact with a biological sample, the nucleic acid contained in the biological sample having, where appropriate, been previously made accessible to hybridization, under conditions which allow hybridization of the probe to the nucleic acid of a bacterium belonging to the species Listeria monocytogenes, or to an associated microorganism;
b) demonstrating the hybrid possibly formed between the nucleotide probe and the nucleic acid of the biological sample.

92. The method as claimed in claim 89, characterized in that it comprises the following steps:
a) bringing a nucleotide probe immobilized on a support as claimed in claim 53 into contact with a biological sample, the nucleic acid of the sample having, where appropriate, previously been made accessible to hybridization, under conditions which allow hybridization of the probe to the nucleic acid of a bacterium belonging to the species Listeria monocytogenes, or to an associated microorganism;
b) bringing the hybrid formed between the nucleotide probe immobilized on a support and the nucleic acid contained in the biological sample, where appropriate after removing the nucleic acid of the biological sample which has not hybridized with the probe, into contact with a labeled nucleotide probe as claimed in claim 52;
c) demonstrating the new hybrid formed in step b).

93. The method as claimed in claim 92, characterized in that, prior to step a), the DNA of the biological sample, or the cDNA optionally obtained by reverse transcription of the RNA of the sample, is amplified using at least one primer as claimed in one of claims 51 to 55.

94. A kit or pack for detecting and/or identifying bacteria belonging to the species Listeria monocytogenes, or to an associated microorganism, characterized in that it comprises the following elements:
a) a nucleotide probe as claimed in one of claims 51 to 55;
b) optionally, the reagents required for carrying out a hybridization reaction;
c) optionally, at least one primer as claimed in one of claims 51 to 55 and also the reagents required for a DNA amplification reaction.

95. A kit or pack for detecting and/or identifying bacteria belonging to the species Listeria monocytogenes, or to an associated microorganism, characterized in that it comprises the following elements:
a) a nucleotide probe, termed capture probe, as claimed in claim 53;
b) an oligonucleotide probe, termed detection probe, as claimed in claim 52;
c) optionally, at least one primer as claimed in one of claims 51 to 55 and also the reagents required for a DNA amplification reaction.

96. A kit or pack for detecting and/or identifying bacteria belonging to the species Listeria monocytogenes, or to an associated microorganism, characterized in that it comprises the following elements:
a) at least one primer as claimed in one of claims 51 to 55;
b) optionally, the reagents required for carrying out a DNA amplification reaction;
c) optionally, a component for verifying the sequence of the amplified fragment, more particularly an oligonucleotide probe as claimed in one of claims 51 to 55.

97. A method as claimed in claims 81, 82 and 89 to 93, or a kit or pack as claimed in claims 83, 87, 88 and 94 to 96, for detecting and/or identifying bacteria belonging to the species Listeria monocytogenes, characterized in that said primer and/or said probe are chosen from the nucleotide sequences as claimed in one of claims 2 to 4, 8 to 26, 51 to 55 and 77, specific for the species Listeria monocytogenes, and in that said polypeptides are chosen from the polypeptides as claimed in one of claims 5 to 7, 27 to 44 and 74 or 76, specific for the species Listeria monocytogenes, and in that said antibodies are chosen from the antibodies as claimed in either of claims 79 and 80, directed against polypeptides chosen from the polypeptides as claimed in one of claims 5 to 7, 26 to 44, 74 or 76, specific for the species Listeria monocytogenes.

98. A method or a kit or pack as claimed in claim 97, characterized in that said primer and/or said probe are chosen from the nucleotide sequences encoding a secreted protein, in that said polypeptides are chosen from secreted polypeptides, and in that said antibodies are chosen from the antibodies as claimed in either of claims 79 and 80, directed against secreted or surface polypeptides of Listeria monocytogenes, said polypeptides preferably being SEQ ID NO. 2 to SEQ ID NO. 41.

99. A strain of Listeria monocytogenes, characterized in that it contains at least one mutation in at least one nucleotide sequence as claimed in one of claims 2 to 4 or 8 to 26.

100. The strain of Listeria monocytogenes as claimed in claim 99, characterized in that it contains a mutation in a nucleotide sequence as claimed in claim 13.

101. The strain of Listeria monocytogenes as claimed in claim 99, characterized in that it contains a mutation in a nucleotide sequence as claimed in claim 14.

102. The strain of Listeria monocytogenes as claimed in claim 99, characterized in that it contains a mutation in a nucleotide sequence as claimed in claim 9, 19 or 20.

103. The strain of Listeria monocytogenes as claimed in claim 99, characterized in that it contains a mutation in a nucleotide sequence as claimed in claim 12, in particular encoding a protein involved in secretion mechanisms.

104. The strain of Listeria monocytogenes as claimed in claim 99, characterized in that it contains a mutation in a nucleotide sequence encoding a protein involved in resistance and/or adaptation to stress.

105. The strain of Listeria monocytogenes as claimed in claim 99, characterized in that it contains a mutation in a nucleotide sequence encoding a protein involved in vitamin B 12 biosynthesis.

106. The strain of Listeria monocytogenes as claimed in one of claims 99 to 105, characterized in that the mutation leads to inactivation of the gene.

107. The strain of Listeria monocytogenes as claimed in one of claims 99 to 105, characterized in that the mutation leads to overexpression of the gene.

108. The use of a polypeptide as claimed in one of claims 5 to 7, 27 to 44, 74 and 76, of a transformed cell as claimed in one of claims 69 to 71, of a strain as claimed in claims 99 to 107 and/or of an animal as claimed in claim 72, for the biosynthesis or biodegradation of a compound of interest.

109. A method of biosynthesis or of biodegradation of a compound of interest, characterized in that it uses a polypeptide as claimed in one of claims 5 to 7, 26 to 44, 74 and 76, a transformed cell as claimed in one of claims 69 to 71, a strain as claimed in one of claims 99 to 107 and/or an animal as claimed in claim 72.

110. The use as claimed in claim 108 or the method as claimed in claim 109, characterized in that the compound of interest is vitamin B12.

111. The use of a nucleotide sequence as claimed in one of claims 2 to 4 and 8 to 26, of a polypeptide as claimed in one of claims 5 to 7, 27 to 44, 74 and 76, of an antibody as claimed in either of claims 79 and 80, of a cell as claimed in one of claims 69 to 71 and/or of a transformed animal as claimed in claim 72, for selecting an organic or inorganic compound capable of modulating, regulating, inducing or inhibiting gene expression, and/or of modifying cell replication in eukaryotic or prokaryotic cells, or capable of inducing, inhibiting or worsening, in an animal or human organism, pathological conditions linked to an infection with Listeria monocytogenes or with an associated microorganism.

112. A method for selecting a compound capable of binding to a polypeptide as claimed in one of claims 5 to 7, 27 to 44, 74 and 76, capable of binding to a nucleotide sequence as claimed in one of claims 2 to 4 and 8 to 26, or capable of recognizing an antibody as claimed in either of claims 79 and 80, and/or capable of modulating, regulating, inducing or inhibiting gene expression, and/or of modifying cell replication in eukaryotic or prokaryotic cells, or capable of inducing, inhibiting or worsening, in an animal or human organism, pathological conditions linked to an infection with Listeria monocytogenes, characterized in that it comprises the following steps:
a) bringing said compound into contact with said polypeptide or said nucleotide sequence or with a transformed cell as claimed in one of claims 69 to 71 and/or administering said compound to a transformed animal as claimed in claim 72;
b) determining the ability of said compound to bind to said polypeptide or said nucleotide sequence, or to modulate, regulate, induce or inhibit gene expression, or to modulate the cell growth or replication, or to induce, inhibit or worsen, in said animal or human organism, pathological conditions linked to an infection with Listeria monocytogenes or with an associated microorganism.

113. A compound which can be selected using a method as claimed in claim 112.

114. A pharmaceutical composition comprising a compound chosen from the following compounds:
a) a nucleotide sequence as claimed in one of claims 2 to 4 and 8 to 26;
b) a polypeptide as claimed in one of claims 5 to 7, 27 to 44, 74 and 76;
c) a vector as claimed in one of claims 62 to 68 and 78;
d) an antibody as claimed in claim 79 or 80; and
e) a compound as claimed in claim 113.

115. A composition as claimed in claim 114, optionally in combination with a pharmaceutically acceptable vehicle.

116. The pharmaceutical composition as claimed in either of claims 114 and 115, for preventing or treating an infection with a bacterium belonging to the species Listeria monocytogenes, or with an associated microorganism.

117. A vaccinal composition, characterized in that it comprises one or more polypeptides as claimed in one of claims 5 to 7, 27 to 44 and 74, and/or one or more hybrid polypeptides as claimed in claim 76.

118. The use of a cell as claimed in one of claims 62 to 68, for preparing a vaccinal composition.

119. A vaccinal composition, characterized in that it contains a vector as claimed in one of claims 62 to 68 and 78, and/or a cell as claimed in one of claims 69 to 71.

120. A vaccinal composition capable of inducing a cellular or humoral response, for preventing or treating an infection with a bacterium belonging to the species Listeria monocytogenes, or with an associated microorganism, characterized in that it comprises an immunogenic composition as claimed in either of claims 117 and 119, in combination with a pharmaceutically acceptable vehicle and, optionally, one or more suitable adjuvants of immunity.

121. A genomic DNA library of a bacterium of the Listeria genus, characterized in that said DNA library is cloned in bacterial artificial chromosomes (BACs).

122. The genomic DNA library as claimed in claim 121, characterized in that said bacterium is Listeria monocytogenes.

123. The genomic DNA library as claimed in claim 121, characterized in that said bacterium is the EGD-e strain of Listeria monocytogenes.

124. The library as claimed in claim 122, characterized in that it is the LM-baclib library deposited with the CNCM on Apr. 11, 2000, under the number I-2439.

125. A method for isolating a polynucleotide of interest present in a strain of Listeria and absent from another strain, characterized in that it uses at least one library as claimed in either of claims 121 and 124.

126. The method as claimed in claim 125, characterized in that it comprises the following steps:
a) isolating at least one polynucleotide contained in a clone from the DNA library based on a BAC, of listeria origin;
b) isolating:
at least one genomic polynucleotide or cDNA of a listeria, said listeria belonging to a strain which is different from the strain used to construct the BAC DNA library of step a) or, alternatively,
at least one polynucleotide contained in a clone from a DNA library based on a BAC prepared from the genome of a Listeria which is different from the listeria used to construct the DNA library based on the BAC of step a);
c) hybridizing the polynucleotide of step a) to the polynucleotide of step b);
d) selecting the polynucleotides of step a) which have not formed a hybridization complex with the polynucleotides of step b);
e) characterizing the polynucleotide selected.

127. A genomic library of a bacterium of the Listeria genus.

128. The genomic library as claimed in claim 127, characterized in that the bacterium is Listeria monocytogenes.
